(19) United States
(12) Patent Application Publication
(10) Pub. No.: US 2007/0079401 A1
(43) Pub. Date: Apr. 5, 2007

(54) Control of floral induction

(75) Inventors: Tony James Lough, Auckland (NZ); Dieter H. Hermsmeier, Minot, ND (US); Erika Varkonyi-Gasic, Auckland (NZ); Justin Sweetman, Auckland (NZ); Ilkka J. Havukkala, Auckland (NZ); Helene Belanger, Auckland (NZ); Richard L.S. Forster, Auckland (NZ); Keith R. Hudson, Auckland (NZ); William J. Lucas, Davis, CA (US)

Correspondence Address: SPECKMAN LAW GROUP PLLC, 1201 THIRD AVENUE, SUITE 330, SEATTLE, WA, 98101, US

(73) Assignees: AgriGenesis Biosciences Limited, Auckland (NZ); The Regents of the University of California, Oakland, CA (US)

(21) Appl. No.: 11/528,043

(22) Filed: Sep. 26, 2006

Related U.S. Application Data
(63) Continuation-in-part of application No. 11/138,966, filed on May 26, 2005.
Application No. 11/138,966 is a continuation-in-part of application No. 10/931,081, filed on Aug. 30, 2004, now Pat. No. 7,071,380.
(60) Provisional application No. 60/498,940, filed on Aug. 29, 2003.
(60) Provisional application No. 60/509,440, filed on Oct. 7, 2003.
(60) Provisional application No. 60/587,881, filed on Jul. 14, 2004.

(51) Int. Cl. A01H 1/00; C07H 21/04; C12N 9/24; C12N 15/82; C12N 5/04

(52) U.S. Cl. 800/287; 435/200; 435/419; 435/468; 536/23.2

(57) ABSTRACT

The present application discloses plant polynucleotides, their encoded polypeptide sequences, and sRNA sequences which are putative regulators of long-distance florigenic signaling and flowering control. Methods of use of these sequences related to long-distance florigenic signaling are also disclosed.

### CROSS-REFERENCE TO RELATED APPLICATIONS

[0001] This application is a continuation-in-part of U.S. patent application Ser. No. 11/138,966, filed May 26, 2005, which is a continuation-in-part of U.S. patent application Ser. No. 10/931,081, filed Aug. 30, 2004, now U.S. Pat. No. 7,071,380, which claims priority to U.S. Provisional Patent Application No. 60/498,940, filed Aug. 29, 2003, U.S. Provisional Patent Application No. 60/509,440, filed Oct. 7, 2003, and U.S. Provisional Patent Application No. 60/587,881, filed Jul. 14, 2004.

### GOVERNMENT RIGHTS

[0002] This invention was made with Government support under Grant (or Contract) Nos. IBN-03-151174 awarded by the National Science Foundation and DE-FG03-94ER20134 awarded by the Department of Energy Division of Biosciences. The government has certain rights in this invention.

### REFERENCE TO SEQUENCE LISTING SUBMITTED ON COMPACT DISC

[0003] This application incorporates by reference in its entirety the Sequence Listing contained in the accompanying two compact discs, one of which is a duplicate copy. Each CD contains a single file, name “1084C2 SEQLIST.TXT”, the size of which is 1,242 KB, and which was created on Sep. 26, 2006 in IBM-PC MS-Windows format pursuant to 37 CFR §1.52(e).

### FIELD OF THE INVENTION

[0004] This application relates to control of systemic signaling processes in plants by phloem-regulatory molecules. In particular, this application is directed to the identification and isolation of phloem regulators of flowering in plants.

### BACKGROUND

[0005] Flowering is an age (development)-dependent response which occurs following a period of vegetative growth in which the plant acquires the competence to flower. The timing of flowering is highly regulated to ensure effective pollination and that seed maturation occurs under favorable environmental conditions.

[0006] The earliest stage of flowering, floral evocation, is characterized by the normally irrevocable commitment of shoot apical meristem (SAM) to form an inflorescence or floral meristem. Floral evocation occurs prior to the appearance of detectable morphological or functional changes in the SAM. Subsequently, the floral primordium differentiates and forms floral organs, the flower matures and opens.

[0007] Environmental inputs are also involved in the onset of floral evocation. In certain species of plants, floral evocation will not occur in the absence of an appropriate environmental stimulus (for example, day length (photoperiodism), cold temperatures (vernalization), drought and/or other environmental stresses), while in other species, floral evocation will occur at a time that is predetermined genetically for that species but is susceptible to modulation by the environment. Genetic studies in Arabidopsis have provided information about the organization and integration of flower signaling pathways in this model system in which there exists three flower signaling pathways: an age-dependent, daylength-independent pathway which operates in the absence of promoting signals; an autonomous pathway which suppresses the vegetative-to-flowering transition; and a photoperiodic pathway which, in this species of plant, is triggered when the photoperiod exceeds a critical length (reviewed by Devlin and Kay, Science 288:1600, 2000).

[0008] Flowering control in Arabidopsis is normally described as being controlled by four pathways: (1) autonomous promotion; (2) vernalization promotion; (3) gibberellic acid promotion; and (4) photoperiod promotion (Simpson et al., Ann. Rev. Cell Dev. Biol. 99: 519-550, 1999).

[0009] An understanding of the flower control mechanisms that operate in agronomically and horticulturally important plants is a prerequisite for being able to control the occurrence, timing and extent of flower and seed production. The ability to override, or change, the genetic programs of flowering plants, for example to accelerate flowering or to permit flowering under environmental conditions different from normal conditions, without altering the fertility of the plants or their desirable traits would be of tremendous importance in agriculture and horticulture. The acceleration of flowering is useful in plant breeding to increase the efficiency and speed of selection of improved traits, and is also useful in the ornamental flower industry. The ability to delay flowering is important in certain crop plants in which flowering overlaps with growth of harvested vegetation, such as onions, bulbs, lettuce, cabbage and pasture crops.

[0010] One of the most useful paradigms for studying the control of flowering is the photoperiodic response. In many plant species, mature leaves serve as photoreceptors for photoperiodic induction leading to floral initiation within the vegetative meristem. Although the identity of the transmitted flowering stimulus is presently unknown, grafting and defoliation experiments have provided irrefutable evidence that a flowering stimulus is produced in the leaves of plants exposed to a favorable photoperiod. Upon stimulation, a phloem-mobile agent, termed florigen, appears to be released from leaf cells for translocation and delivery into the terminal phloem cells within the apex of the plant. Relay of the florigenic signal from the phloem to the founder cells within the SAM then gives rise to the activation of a new developmental program that generates floral meristems and, eventually, flowers. Available evidence suggests that flower development in certain species of plants may be controlled by both positive and negative regulatory factors, the latter at times being produced in response to an unfavorable photoperiodic stimulus (see, for example, Gibby and Salisbury, Plant Physiol. 47:784-789 (1971); Lang et al., Proc. Natl. Acad. Sci. USA 74:2412-2416 (1977).

[0011] Significant progress has been made in identifying structural and regulatory genes involved in pathways of flower development and in understanding the hierarchical controls that integrate multiple pathways. See, e.g., Levy and Dean, Plant Cell 10:1973-1989 (1998); Simpson et al., Annu. Rev. Cell Dev. Biol. 99:519-50 (1999). Multiple environmental and endogenous signals are integrated by floral integrator genes, which participate in the upregulation of floral meristem identity genes that is required for flowering.

[0012] Genetic analysis in Arabidopsis has revealed many of the genes involved in photoperiod-mediated flowering. In this pathway, the timing of the floral transition is coordinated with day-length, as sensed by the circadian oscillator. The transition is accelerated in response to long days and retarded in response to short days. CO (CONSTANS), a transcription factor, plays an important regulatory role in this process. The level of CO mRNA is circadian clock-regulated. Under long day length conditions (LD), CO protein accumulates late in the day and directly activates transcription of FT (FLOWERING LOCUS T), a floral integrator gene. The level of CO-activated FT expression in Arabidopsis is tightly regulated by TFL2 (TERMINAL FLOWER 2), a gene that is coexpressed with CO and FT in leaf vascular tissue (Takada and Goto, The Plant Cell 15:2856-2865 (2003)).

[0013] FT encodes a RAF-kinase-inhibitor-like protein that promotes flowering. The Arabidopsis FT polynucleotide and polypeptide sequences, and methods of their use in accelerating or delaying flowering, are disclosed in U.S. Pat. Nos. 6,225,530 and 6,713,663, respectively.

[0014] CO also activates LEAFY (LFY), a floral meristem identity gene. FT, together with LFY, promotes flowering. The loss of FT delays flowering, whereas overexpression of FT accelerates flowering by a CO-and photoperiod-independent process.

[0015] FT belongs to a gene family which is conserved in plants, mammals and fungi. Two known plant family members are CEN (Antirrhinum majus) and TFL1 (Arabidopsis thaliana). TFL1 is required for establishing and maintaining the inflorescence meristem. TFL1 and CEN are orthologous genes according to phylogenetic tree analysis of the protein sequences (see U.S. Pat. No. 6,225,530). FT, acting downstream of CO, promotes flowering, whereas TFL1 represses flowering.

[0016] Flowering promotion by FT requires FD, a bZIP transcription factor-encoding gene. FD is preferentially expressed in the shoot apex and activates transcription of the floral meristem identity genes AP1 and CAL. The overexpression of FD in seedlings upregulates AP1 expression only when FT is present. The interaction of FD with FT may require phosphorylation of the C-terminus of FD (Daimon et al., Abstract T01-033, 15^{th} International Conference on Arabidopsis, Berlin, Germany, Jul. 11-14, 2004).

[0017] TFL1 interacts with FDP, a bZIP transcription factor which is closely related to FD. The interaction of FDP and TFL1 may be required to prevent inappropriate activation of flowering by FD and FT in the SAM (Wigge et al., Abstract T01-070, 15^{th} International Conference on Arabidopsis, Berlin, Germany, Jul. 11-14, 2004). Reportedly, both TFL1 and FT protein move from cell to cell in the SAM (Goto and Nakayama, Abstract T01-053, 15^{th} International Conference on Arabidopsis, Berlin, Germany, Jul. 11-14, 2004).

[0018] Studies from our laboratory have shown that ectopic expression of the Arabidopsis FT gene in the vasculature of Cucurbita moschata, grown under non-flowering photoperiod conditions, promotes flowering in the meristem. As described in detail below, a viral vector system based on Zucchini yellow mosaic potyvirus (ZYMV) was used to express FT (ZYMV-FT) in C. moschata PI441726. In contrast to control plants inoculated with ZYMV-GFP, plants inoculated with ZYMV-FT formed floral buds and flowered within 23-35 days. These results were obtained in replicate independent experiments with four to six plants per experiment. Representative results are shown below in FIG. 145. Our results show that expression of FT in the vasculature sends a signal to the meristem to initiate flowering. These results are consistent with the possibility that FT, or a peptide fragment of FT, acts as the signal, as potyviruses are normally excluded from the meristem of plants (Jones et al., EMBO J. 17:6385-6393, 1998). However, as discussed in the Detailed Description below, these results are also consistent with the possibility that FT participates in a signaling complex with other interacting molecules and that one of these interacting molecules, or a different gene altogether, comprises the long-distance florigenic signal

[0019] Coupland and colleagues expressed CO::GUS promoter-reporter gene constructs in Arabidopsis and found expression of the reporter gene in both vascular tissue and the SAM. Mis-expression of CO from phloem-specific promoters, but not meristem-specific promoters, induced early flowering and complemented a late-flowering constans mutation. CO activates flowering through both FT-dependent and FT-independent processes (An et al., Development 131:3615-3626, 2004; Laurent et al., Abstract T01-048, 15^{th} International Conference on Arabidopsis, Berlin, Germany, Jul. 11-14, 2004).

[0020] Micrografting experiments and ectopic misexpression experiments in Arabidopsis have shown that certain flowering time mutants can be rescued by long-distance signaling, and that the expression of FT in tissues that include the apex and leaves is sufficient to promote flowering (An et al., Development 131:3615-3626, 2004; Turnbull and Justin, Abstract T01-099, 15^{th} International Conference on Arabidopsis, Berlin, Germany, Jul. 11-14, 2004). However, as CO controls FT expression from a vascular domain, it appears likely that FT similarly promotes flowering from a vascular domain. The capacity of FT to promote flowering following ectopic expression external to the vasculature may reflect a capacity of FT to traffic between cells and once again promote flowering from a vascular domain.

[0021] The CEN, TFL1, FT and SP (SELF-PRUNING) genes are a closely related set of plant genes which are implicated as regulators of the timing of switching of meristems from vegetative to reproductive growth (all except FT delay flowering) (Bradley et al., Science 275:80-83 (1997); Bradley et al., Nature 379:791-797 (1996); Pneuli et al., Development 125:1979-1989 (1998); Pneuli et al., Plant Cell, 13:2687-2702 (2001)). This gene family, recently named CETS (Pneuli et al., Ibid), is comprised of plant homologs of the mammalian phosphatidylethanolamine binding proteins (PEBPs), which include serine protease inhibitors, Raf-1 kinase inhibitor (RKIP), and precursor for hippocampal neurostimulatory peptide (HCNP). Six CETS members have been identified in Arabidopsis and six in tomato.

[0022] Two-hybrid screens and in vitro binding assays have revealed the presence of SP-interacting proteins (SIPs) in tomato (Pneuli et al., Plant Cell, 13:2687-2702, 2001). These SIPs include: SPAK, a novel plant serine-threonine NIMA-like kinase; several isoforms of the 14-3-3 family of adapter proteins; and SPGB, a putative bZIP G-box binding transcription factor C-terminal sequence with similarity to GBF4.

[0023] SIPs may function as components of an SP-dependent signaling network in tomato plants. SIPs form specific associations with one another and show overlapping spatio-temporal expression patterns in apical meristem, leaf and stem vasculature, floral primordial of the primary inflorescence, stamens and carpels in developing floral bud and vegetative meristem of the first sympodial segment (Pneuli et al., 2001, Ibid). Several of the binding interactions are phosphorylation-dependent. For example, the binding of SP to SPAK and the binding of SIP4 and SPAK to 14-3-3/74 requires phosphorylation of SPAK at Serine 406. Both CEN and TFL1 bind SPAK, 14-3-3/74 and SPGB proteins but not SIP4 (a novel 10 kDa protein). FT showed the same binding pattern as TFL1.

[0024] The biological functions of SP/14-3-3/SPAK interactions in tomato plants are not yet understood. Nevertheless, the finding that CETS proteins of Arabidopsis and Antirrhinum form specific complexes with tomato SIPs suggests that protein-protein interactions may be necessary for CETS protein function in plants with widely differing shoot and flowering architecture.

[0025] PCT Application No. WO 96/34088 discloses the isolation of the Id gene, which is thought to be important in regulating the transition to flowering in maize. The Id gene encodes a zinc-finger protein that is apparently transcribed in young leaves but not in the shoot apical meristem. The mechanism by which this gene produces its effects at the SAM has not yet been elucidated. Mutated forms of the gene are proposed for use in accelerating or delaying floral induction in a plant. PCT Application No. WO 97/25433 describes chimeric vectors comprising FPF (flowering promoting factor) genes from mustard, and homologous genes from other plants, and uses thereof for inducing early flowering or inhibiting flowering in various crop plants.

[0026] Progress has also been made in understanding how plants transport materials from cell-to-cell and systemically throughout the plant. These studies have provided evidence for a systemic communication network that comprises a phloem translocation system which is capable of transporting not only small phytohormones and nutrients but also macromolecules (such as peptides, proteins and nucleic acids) between spatially distant tissues and organs of the plant. The identification of specific transcripts and signaling molecules in phloem sap suggests that this communication network is involved in the coordination of growth and development, and may participate in systemic acquired resistance to pathogens (Narvaez-Vasquez et al., Planta 195:593-600 (1995)), systemic gene silencing (Jorgensen et al., Science 279:1486-1487 (1988)), biomass distribution, regulation of carbon metabolism and control of plant size (Lucas, Published PCT applications WO 97/06669 and WO 97/20470), and floral development (Ruiz-Medrano et al., Development 126:4405-4419 (1999) and references cited therein; Baulcombe, Published PCT application WO 99/15682). A systemic small RNA binding protein which may function in sRNA signaling has been isolated from several plant species and is disclosed in U.S. Published Patent Application No. US-2005-0050588-A1.

[0027] The broad outlines of florigen signaling have emerged from these and prior studies, but the signal(s) that initiate floral evocation and the manner in which the long-distance florigen signaling pathway is regulated are presently unknown. These objectives are addressed in the present application.

### SUMMARY OF THE INVENTION

[0028] The present invention provides methods for: (1) identifying the long-distance florigenic signaling component and/or signaling complex (LDFSC) and other genes in the florigenic signaling cascade; (2) modifying the occurrence, timing and extent of flower development by modulating the florigenic signaling pathway; and (3) screening for inducers, repressors and modulators of florigenic signaling. The invention further provides isolated polynucleotide sequences from plant species that encode putative regulators of long-distance florigenic signaling. These polynucleotide sequences are identified in the Sequence Listing as SEQ ID NO: 1-25, 119-151, 271-298, 375-378, 559-636 and 871 (cucurbits); SEQ ID NO: 51-75, 185-217, 299-322 and 403-480 (Arabidopsis orthologs); and SEQ ID NO: 715-792 (Festuca arundinacea orthologs). Their encoded polypeptide sequences are identified respectively as SEQ ID NO: 26-50, 152-184, 323-350, 379, 380, 637-714 and 872 (cucurbits); SEQ ID NO: 76-100, 218-250, 351-374 and 481-558 (Arabidopsis orthologs); and SEQ ID NO: 793-870 (Festuca arundinacea orthologs).

[0029] SEQ ID NO: 132 and 165 are, respectively, the polynucleotide and encoded polypeptide sequence of a first C. maxima FT-like protein, referred to as CmFTL1; SEQ ID NO: 871 and 872 are, respectively, the polynucleotide and encoded polypeptide sequence of a second C. maxima FT-like protein, referred to as CmFTL2; SEQ ID NO: 198 and 231 are, respectively, the polynucleotide and encoded polypeptide sequence of A. thaliana FT.

[0030] The polynucleotide sequences of SEQ ID NO: 271-322 encode regulatory molecules which include putative orthologs of SIPs described in Pneuli et al., Plant Cell 13, 2687-2702 (2001).

[0031] Putative sRNA phloem mobile regulators of flowering have been identified in Cucurbit phloem sap databases. These sequences are identified as SEQ ID NO: 251-263. The present invention encompasses genetic constructs comprising these polynucleotides, together with transgenic plants comprising the constructs that display modified flowering responses as compared with unmodified native plants.

### BRIEF DESCRIPTION OF THE FIGURES

[0032] FIG. 1 is a schematic illustrating aspects of the florigen signaling pathway.

[0033] FIG. 2. Amino acid sequence of SEQ ID NO: 26. The conserved Myb2 domain is underlined and conserved SHAQKYF domain is in bold (Rose et al., Plant J. 20:641-652, 1999).

[0034] FIG. 3. Amino acid sequence of SEQ ID NO: 27. The conserved RNA-binding region RNP-1 (RNA recognition motif) is in bold/italics and the C-x8-C-x5-C-x3-H type zinc finger is underlined with the conserved Cys and His residues boxed (Deng et al., Cell 71:791-801, 1992).

[0035] FIG. 4. Amino acid sequence of SEQ ID NO: 28. The conserved response regulator receiver domain is underlined.

[0036] FIG. 5. Amino acid sequence of SEQ ID NO: 30. The conserved C-x8-C-x5-C-x3-H type zinc finger is underlined with the conserved Cys and His residues boxed (Deng et al., Cell 71:791-801, 1992).

[0037] FIG. 6. Amino acid sequence of SEQ ID NO: 31. The conserved pathogenesis-related transcriptional factor and ERF domain is underlined.

[0038] FIG. 7. Amino acid sequence of SEQ ID NO: 32. The conserved No Apical Meristem (NAM) protein domain is underlined.

[0039] FIG. 8. Amino acid sequence of SEQ ID NO: 33. The conserved basic-leucine zipper (bZIP) transcription factor domain is underlined with the basic-leucine zipper (bZIP) domain signature boxed. Hydrophobic residues that constitute a leucine zipper are in bold (Hobo et al., Proc. Natl. Acad. Sci. USA 96:15348-15353, 1999).

[0040] FIG. 9. Amino acid sequence of SEQ ID NO: 34. The conserved C-x8-C-x5-C-x3-H type zinc finger is underlined with the conserved Cys and His residues boxed (Deng et al., Cell 71:791-801, 1992), and the conserved ankyrin domain is in bold/italics.

[0041] FIG. 10. Amino acid sequence of SEQ ID NO: 35. The conserved Pathogenesis-related transcriptional factor and ERF domain is underlined.

[0042] FIG. 11. Amino acid sequence of SEQ ID NO: 36. The conserved AUX/IAA protein domain is underlined.

[0043] FIG. 12. Amino acid sequence of SEQ ID NO: 37. The conserved AUX/IAA protein domain is underlined.

[0044] FIG. 13. Amino acid sequence of SEQ ID NO: 38. The conserved response regulator receiver domain is underlined.

[0045] FIG. 14. Amino acid sequence of SEQ ID NO: 39. The conserved HSF-type DNA-binding domain is underlined with the HSF-type DNA-binding domain signature boxed.

[0046] FIG. 15. Amino acid sequence of SEQ ID NO: 40. The conserved WRKY domain is underlined and contains the highly conserved WRKYGQK motif (boxed; Eulgem et al., EMBO J. 18:4689-4699, 1999) and a conserved C2H2 zinc finger of the WRKY Group II. The conserved cysteine and histidine residues of the zinc finger are double-underlined and in bold (Eulgem et al., Trends Plant Sci. 5:199-206, 2000).

[0047] FIG. 16. Amino acid sequence of SEQ ID NO: 41. The conserved basic-leucine zipper (bZIP) transcription factor domain is underlined and the hydrophobic residues that constitute a leucine zipper are boxed (Hobo et al., Proc. Natl. Acad. Sci. USA 96:15348-15353, 1999).

[0048] FIG. 17. Amino acid sequence of SEQ ID NO: 42. The conserved basic-leucine zipper (bZIP) transcription factor domain is underlined and the hydrophobic residues that constitute a leucine zipper are boxed (Hobo et al., Proc. Natl. Acad. Sci. USA 96:15348-15353, 1999).

[0049] FIG. 18. Amino acid sequence of SEQ ID NO: 43. The conserved jumonji transcription factor, jmjC domain is underlined.

[0050] FIG. 19. Amino acid sequence of SEQ ID NO: 44. The conserved jumonji transcription factor, jmjC domain is underlined.

[0051] FIG. 20. Amino acid sequence of SEQ ID NO: 46. The conserved No Apical Meristem (NAM) protein domain is underlined.

[0052] FIG. 21. Amino acid sequence of SEQ ID NO: 47. The conserved pathogenesis-related transcriptional factor and ERF domain is underlined.

[0053] FIG. 22. Amino acid sequence of SEQ ID NO: 48. The conserved C2H2 type Zn-finger is underlined with the conserved Cys and His residues boxed (Kubo et al., Nucleic Acids Res. 26:608-615, 1998).

[0054] FIG. 23. Amino acid sequence of SEQ ID NO: 49. The conserved No Apical Meristem (NAM) protein domain is underlined.

[0055] FIG. 24. Amino acid sequence of SEQ ID NO: 50. The conserved WRKY domain is underlined and contains the highly conserved WRKYGQK motif (boxed; Eulgem et al., EMBO J. 18:4689-4699, 1999) and a conserved C2H2 zinc finger of the WRKY Group II with the conserved cysteine and histidine residues double-underlined and in bold (Eulgem et al., Trends Plant Sci. 5:199-206, 2000).

[0056] FIG. 25. Amino acid sequence of SEQ ID NO: 76, encoding a Myb transcription factor. The conserved Myb2 domain is underlined and conserved SHAQKYF domain is in bold (Rose et al., Plant J. 20:641-652, 1999).

[0057] FIG. 26. Amino acid sequence of SEQ ID NO: 77. The conserved RNA-binding region RNP-1 (RNA recognition motif) is in bold/italics and the C-x8-C-x5-C-x3-H type zinc finger is underlined with the conserved Cys and His residues boxed (Deng et al., Cell 71:791-801, 1992).

[0058] FIG. 27. Amino acid sequence of SEQ ID NO: 78. The conserved response regulator receiver domain is underlined.

[0059] FIG. 28. Amino acid sequence of SEQ ID NO: 80, encoding a zinc finger transcription factor. Conserved C-x8-C-x5-C-x3-H type zinc fingers are underlined with the conserved Cys and His residues boxed (Deng et al., Cell 71:791-801, 1992).

[0060] FIG. 29. Amino acid sequence of SEQ ID NO: 81, encoding an AP2 domain transcription factor. The conserved pathogenesis-related transcriptional factor and ERF domain is underlined.

[0061] FIG. 30. Amino acid sequence of SEQ ID NO: 82, encoding a NAM/CUC2 -like protein transcription factor. The conserved No Apical Meristem (NAM) protein domain is underlined.

[0062] FIG. 31. Amino acid sequence of SEQ ID NO: 83, encoding a bZIP protein. The conserved basic-leucine zipper (bZIP) transcription factor domain is underlined with the basic-leucine zipper (bZIP) domain signature boxed. Hydrophobic residues that constitute a leucine zipper are in bold (Hobo et al., Proc. Natl. Acad. Sci. USA 96:15348-15353, 1999).

[0063] FIG. 32. Amino acid sequence of SEQ ID NO: 84, encoding a Cys-3-His zinc finger protein. Conserved C-x8-C-x5-C-x3-H type zinc fingers are underlined with the conserved Cys and His residues boxed (Deng et al., Cell 71:791-801, 1992).

[0064] FIG. 33. Amino acid sequence of SEQ ID NO: 85, encoding a ethylene responsive element binding factor 4. The conserved pathogenesis-related transcriptional factor and ERF domain is underlined.

[0065] FIG. 34. Amino acid sequence of SEQ ID NO: 86, encoding auxin response factor 9. The conserved AUX/IAA protein domain is underlined and the transcriptional factor B3 domain is in bold/italics.

[0066] FIG. 35. Amino acid sequence of SEQ ID NO: 87, encoding an Aux/IAA protein. The conserved AUX/IAA protein domain is underlined.

[0067] FIG. 36. Amino acid sequence of SEQ ID NO: 88, encoding an ARR2 protein. The conserved response regulator receiver domain is underlined.

[0068] FIG. 37. Amino acid sequence of SEQ ID NO: 89, encoding a heat shock transcription factor. The conserved HSF-type DNA-binding domain is underlined with the HSF-type DNA-binding domain signature boxed.

[0069] FIG. 38. Amino acid sequence of SEQ ID NO: 90, encoding a WRKY transcription factor. The conserved WRKY domains are underlined and contain the highly conserved WRKYGQK motif (boxed; Eulgem et al., EMBO J. 18:4689-4699, 1999) and the two conserved C2H2 zinc fingers of the WRKY Group I. The conserved cysteine and histidine residues are double-underlined and in bold (Eulgem et al., Trends Plant Sci. 5:199-206, 2000).

[0070] FIG. 39. Amino acid sequence of SEQ ID NO: 91. The conserved basic-leucine zipper (bZIP) transcription factor domain is underlined with the basic-leucine zipper (bZIP) domain signature boxed. Hydrophobic residues that constitute a leucine zipper are in bold (Hobo et al., Proc. Natl. Acad. Sci. USA 96:15348-15353, 1999).

[0071] FIG. 40. Amino acid sequence of SEQ ID NO: 92. The conserved basic-leucine zipper (bZIP) transcription factor domain is underlined with the basic-leucine zipper (bZIP) domain signature boxed. Hydrophobic residues that constitute a leucine zipper are in bold (Hobo et al., Proc. Natl. Acad. Sci. USA 96:15348-15353, 1999).

[0072] FIG. 41. Amino acid sequence of SEQ ID NO: 93. The conserved jumonji transcription factor jmjN and jmjC domains are underlined. N-and C-terminal FY-rich domains are in bold/italics and a C5HC2 type zinc finger is double underlined with conserved Cys and His residues in bold and boxed (Clissold and Ponting, Trends Biol. Sci. 26:7-9, 2001).

[0073] FIG. 42. Amino acid sequence of SEQ ID NO: 94. The conserved jumonji transcription factor, jmjC domain is underlined.

[0074] FIG. 43. Amino acid sequence of SEQ ID NO: 95. The conserved jumonji transcription factor, jmjC domain is underlined.

[0075] FIG. 44. Amino acid sequence of SEQ ID NO: 96, encoding a NAM transcription factor. The conserved No Apical Meristem (NAM) protein domain is underlined.

[0076] FIG. 45. Amino acid sequence of SEQ ID NO: 97. The conserved pathogenesis-related transcriptional factor and ERF domain is underlined.

[0077] FIG. 46. Amino acid sequence of SEQ ID NO: 98, encoding a zinc finger protein. The conserved C2H2 type Zn-fingers are underlined with the conserved residues boxed (Kubo et al., Nucleic Acids Res. 26:608-615, 1998).

[0078] FIG. 47. Amino acid sequence of SEQ ID NO: 99, encoding a NAM-like transcription factor. The conserved No Apical Meristem (NAM) protein domain is underlined.

[0079] FIG. 48. Amino acid sequence of SEQ ID NO: 100, encoding a WRKY-like transcription factor. The conserved WRKY domain is underlined and contains the highly conserved WRKYGQK motif (boxed; Eulgem et al., EMBO J. 18:4689-4699, 1999) and a conserved C2H2 zinc finger of the WRKY Group II with the conserved cysteine and histidine residues double-underlined and in bold (Eulgem et al., Trends Plant Sci. 5:199-206, 2000).

[0080] FIG. 49 is a diagram illustrating Arbitrarily-Primed Amplified cDNA (APAC).

[0081] FIG. 50. Amino acid sequence of SEQ ID NO: 152. The conserved Histone-fold/TFIID-TAF/NF-Y domain is underlined and the conserved Histone 4 signature is boxed.

[0082] FIG. 51. Amino acid sequence of SEQ ID NO: 153. The conserved DEAD/DEAH helicase box is underlined.

[0083] FIG. 52. Amino acid sequence of SEQ ID NO: 156. The conserved zinc finger RING-type signature is underlined.

[0084] FIG. 53. Amino acid sequence of SEQ ID NO: 157. The conserved Myb DNA-binding domain repeat signature 2 is underlined.

[0085] FIG. 54. Amino acid sequence of SEQ ID NO: 159. The conserved Nuclear protein G9a domain is underlined and the Nuclear protein Zn2+-binding domain is in bold/italics.

[0086] FIG. 55. Amino acid sequence of SEQ ID NO: 162. The conserved Histone 3 domain is underlined and the Histone H3 signature 2 is boxed.

[0087] FIG. 56. Amino acid sequence of SEQ ID NO: 163. The conserved N-terminal and central AAA ATPase domains are underlined. The AAA-protein family signature is boxed.

[0088] FIG. 57. Amino acid sequence of SEQ ID NO: 165. The conserved phosphatidylethanolamine-binding protein is underlined and the phosphatidylethanolamine-binding protein family signature is boxed.

[0089] FIG. 58. Amino acid sequence of SEQ ID NO: 167. The conserved Ribonuclease III family domain is underlined and the Ribonuclease III family signature is boxed.

[0090] FIG. 59. Amino acid sequence of SEQ ID NO: 170. The conserved nuclear protein SET domain is underlined.

[0091] FIG. 60. Amino acid sequence of SEQ ID NO: 171. The conserved helicase C-terminal domain is underlined.

[0092] FIG. 61. Amino acid sequence of SEQ ID NO: 173. The conserved Histone-fold/TFIID-TAF/NF-Y Domain is underlined.

[0093] FIG. 62. Amino acid sequence of SEQ ID NO: 175. The conserved Glycoside Hydrolase domain is underlined.

[0094] FIG. 63. Amino acid sequence of SEQ ID NO: 177. The conserved G-protein beta WD-40 repeats are underlined.

[0095] FIG. 64. Amino acid sequence of SEQ ID NO: 178. The conserved TPR repeat regions are underlined.

[0096] FIG. 65. Amino acid sequence of SEQ ID NO: 181. The conserved nuclear protein G9a domain is underlined.

[0097] FIG. 66. Amino acid sequence of SEQ ID NO: 182. The conserved histone deacetylase family domain is underlined.

[0098] FIG. 67. Amino acid sequence of SEQ ID NO: 183. The conserved MADS-box transcription factor domain is underlined and the MADS-box domain signature 1 is boxed.

[0099] FIG. 68. Amino acid sequence of SEQ ID NO: 218. The conserved Histone-fold/TFIID-TAF/NF-Y domain is underlined.

[0100] FIG. 69. Amino acid sequence of SEQ ID NO: 219. The conserved helicase DEAD/DEAH box is underlined and the C-terminal helicase domain is in bold/italics.

[0101] FIG. 70. Amino acid sequence of SEQ ID NO: 222. The conserved SNF2 related domain is underlined, the helicase DEAD/DEAH box and the C-terminal domain are in bold/italics, and the RING Zn-finger domain is boxed with the conserved Cys and His residues in bold.

[0102] FIG. 71. Amino acid sequence of SEQ ID NO: 225. The conserved nuclear protein SET is underlined, the nuclear protein G9a domain is in bold/italics and the nuclear protein Zn2+-binding domain is double-underlined.

[0103] FIG. 72. Amino acid sequence of SEQ ID NO: 226. A conserved TAZ finger is underlined, and conserved ZZ-type zinc fingers are boxed with Cys and His residues characteristic of the ZZ-type zinc fingers in bold and double underlined (Ponting et al., Trends Biochem. Sci. 21:11-13, 1996; Puls et al., Proc. Natl. Acad. Sci. USA 94:6191-6196, 1997).

[0104] FIG. 73. Amino acid sequence of SEQ ID NO: 227. The conserved RNA-binding region RNP-1 (RNA recognition motif) domains are underlined.

[0105] FIG. 74. Amino acid sequence of SEQ ID NO: 228. The conserved Histone-fold/TFIID-TAF/NF-Y domain is underlined and the histone H3 signature 2 is boxed.

[0106] FIG. 75. Amino acid sequence of SEQ ID NO: 229. A conserved AAA ATPase domain is underlined with the AAA-protein family signature boxed. A conserved bromodomain is in bold/italics.

[0107] FIG. 76. Amino acid sequence of SEQ ID NO: 230. The conserved domain for the GRAS family of transcription factors is underlined.

[0108] FIG. 77. Amino acid sequence of SEQ ID NO: 231. The conserved phosphatidylethanolamine-binding protein domain is underlined and the phosphatidylethanolamine-binding protein family signature is boxed.

[0109] FIG. 78. Amino acid sequence of SEQ ID NO: 232. The conserved RNA-directed DNA polymerase (Reverse transcriptase) domain is underlined, the integrase catalytic domain is in bold/italics and the retrotransposon gag protein is double underlined.

[0110] FIG. 79. Amino acid sequence of SEQ ID NO: 233. The conserved Ribonuclease III family domains are underlined, with the Ribonuclease III family signature boxed. The helicase DEAD/DEAH box and C-terminal domains are in bold/italics.

[0111] FIG. 80. Amino acid sequence of SEQ ID NO: 234. The conserved SNF2 related domain is underlined, two chromo domains are double-underlined, the helicase DEAD/DEAH box and C-terminal domain are in bold/italics and the PHD finger Zn-finger-like domain is boxed.

[0112] FIG. 81. Amino acid sequence of SEQ ID NO: 235. The conserved bromodomain is underlined.

[0113] FIG. 82. Amino acid sequence of SEQ ID NO: 236. The conserved nuclear protein SET is underlined, the nuclear protein G9a domain is in bold/italics and the nuclear protein Zn2+-binding domain is double-underlined.

[0114] FIG. 83. Amino acid sequence of SEQ ID NO: 237. The conserved SNF2 related domain is underlined and the helicase DEAD/DEAH box and C-terminal domains are in bold/italics.

[0115] FIG. 84. Amino acid sequence of SEQ ID NO: 238. The conserved RNA-directed DNA polymerase (Reverse transcriptase) domain is underlined, the integrase catalytic domain is in bold/italics and the retrotransposon gag protein is double underlined.

[0116] FIG. 85. Amino acid sequence of SEQ ID NO: 239. The conserved Histone-fold/TFIID-TAF/NF-Y domain is underlined.

[0117] FIG. 86. Amino acid sequence of SEQ ID NO: 240. The conserved Methyl-CpG Binding domain is in bold/italics and the PHD Zn-finger-like domains are underlined with the conserved residues in bold.

[0118] FIG. 87. Amino acid sequence of SEQ ID NO: 241. The conserved glycoside hydrolase, clan GH-D domain is boxed and the glycoside hydrolase domain is underlined.

[0119] FIG. 88. Amino acid sequence of SEQ ID NO: 242. The conserved SNF2 related domain is underlined and the helicase DEAD/DEAH box and the C-terminal domain are in bold/italics.

[0120] FIG. 89. Amino acid sequence of SEQ ID NO: 243. The conserved bromodomain is in bold/italics, and the G-protein beta WD-40 repeats are underlined.

[0121] FIG. 90. Amino acid sequence of SEQ ID NO: 244. The conserved TPR repeats are underlined.

[0122] FIG. 91. Amino acid sequence of SEQ ID NO: 246. The conserved SNF2 related domain is underlined, the helicase DEAD/DEAH box and the C-terminal domain are in bold/italics, and the RING Zn-finger domain is boxed with the conserved Cys and His residues in bold.

[0123] FIG. 92. Amino acid sequence of SEQ ID NO: 247. The conserved nuclear protein SET is underlined, the nuclear protein G9a domain is in bold/italics and the nuclear protein Zn2+-binding domain is double-underlined.

[0124] FIG. 93. Amino acid sequence of SEQ ID NO: 248. The conserved histone deacetylase family domain is underlined.

[0125] FIG. 94. Amino acid sequence of SEQ ID NO: 249. The conserved MADS-box domain is underlined and the transcription factor K-box is double-underlined.

[0126] FIG. 95. The amino acid sequence of SEQ ID NO: 323. The conserved protein kinase family domain is underlined and the serine/threonine protein kinase active domain is boxed.

[0127] FIG. 96. The amino acid sequence of SEQ ID NO: 324. The conserved serine/threonine protein kinase domain is underlined and the serine/threonine protein kinase active domain is boxed.

[0128] FIG. 97. The amino acid sequence of SEQ ID NO: 325. The conserved basic-leucine zipper (bZIP) transcription factor domain is underlined and the basic-leucine zipper (bZIP) domain signature is boxed.

[0129] FIG. 98. The amino acid sequence of SEQ ID NO: 327. The conserved basic-leucine zipper (bZIP) transcription factor domain is underlined and the basic-leucine zipper (bZIP) domain signature is boxed.

[0130] FIG. 99. The amino acid sequence of SEQ ID NO: 329 The conserved basic-leucine zipper (bZIP) transcription factor domain is underlined and the basic-leucine zipper (bZIP) domain signature is boxed.

[0131] FIG. 100. The amino acid sequence of SEQ ID NO: 330. The conserved basic-leucine zipper (bZIP) transcription factor domain is underlined and the basic-leucine zipper (bZIP) domain signature is boxed.

[0132] FIG. 101. The amino acid sequence of SEQ ID NO: 331. The conserved basic-leucine zipper (bZIP) transcription factor domain is underlined and the basic-leucine zipper (bZIP) domain signature is boxed.

[0133] FIG. 102. The amino acid sequence of SEQ ID NO: 332. The conserved basic-leucine zipper (bZIP) transcription factor domain is underlined and the basic-leucine zipper (bZIP) domain signature is boxed.

[0134] FIG. 103. The amino acid sequence of SEQ ID NO: 333. The conserved basic-leucine zipper (bZIP) transcription factor domain is underlined and the basic-leucine zipper (bZIP) domain signature is boxed.

[0135] FIG. 104. The amino acid sequence of SEQ ID NO: 335. The conserved basic-leucine zipper (bZIP) transcription factor domain is underlined and the basic-leucine zipper (bZIP) domain signature is boxed.

[0136] FIG. 105. The amino acid sequence of SEQ ID NO: 336. The conserved basic-leucine zipper (bZIP) transcription factor domain is underlined and the basic-leucine zipper (bZIP) domain signature is boxed.

[0137] FIG. 106. The amino acid sequence of SEQ ID NO: 337. The conserved 14-3-3 family domain is underlined and the 14-3-3 proteins signatures 1 and 2 are boxed.

[0138] FIG. 107. The amino acid sequence of SEQ ID NO: 338. The conserved 14-3-3 family domain is underlined and the 14-3-3 proteins signatures 1 and 2 are boxed.

[0139] FIG. 108. The amino acid sequence of SEQ ID NO: 339 The conserved 14-3-3 family domain is underlined and the 14-3-3 proteins signatures 1 and 2 are boxed.

[0140] FIG. 109. The amino acid sequence of SEQ ID NO: 340. The conserved 14-3-3 family domain is underlined and the 14-3-3 proteins signature 1 is boxed.

[0141] FIG. 110. The amino acid sequence of SEQ ID NO: 341. The conserved 14-3-3 family domain is underlined and the 14-3-3 proteins signature 1 is boxed.

[0142] FIG. 111. The amino acid sequence of SEQ ID NO: 342. The conserved 14-3-3 family domain is underlined and the 14-3-3 proteins signatures 1 and 2 are boxed.

[0143] FIG. 112. The amino acid sequence of SEQ ID NO: 343. The conserved 14-3-3 family domain is underlined and the 14-3-3 proteins signature 1 is boxed.

[0144] FIG. 113. The amino acid sequence of SEQ ID NO: 344. The conserved 14-3-3 family domain is underlined and the 14-3-3 proteins signatures 1 and 2 are boxed.

[0145] FIG. 114. The amino acid sequence of SEQ ID NO: 345. The conserved 14-3-3 family domain is underlined and the 14-3-3 proteins signature 1 is boxed.

[0146] FIG. 115. The amino acid sequence of SEQ ID NO: 346. The conserved 14-3-3 family domain is underlined and the 14-3-3 proteins signatures 1 and 2 are boxed.

[0147] FIG. 116. The amino acid sequence of SEQ ID NO: 347. The conserved 14-3-3 family domain is underlined and the 14-3-3 proteins signatures 1 and 2 are boxed.

[0148] FIG. 117. The amino acid sequence of SEQ ID NO: 348. The conserved 14-3-3 family domain is underlined and the 14-3-3 proteins signatures 1 and 2 are boxed.

[0149] FIG. 118. The amino acid sequence of SEQ ID NO: 349. The conserved 14-3-3 family domain is underlined and the 14-3-3 proteins signature 1 is boxed.

[0150] FIG. 119. The amino acid sequence of SEQ ID NO: 350. The conserved 14-3-3 family domain is underlined and the 14-3-3 proteins signature 1 is boxed.

[0151] FIG. 120. The amino acid sequence of SEQ ID NO: 351. The conserved protein kinase family domain is underlined and the serine/threonine protein kinase active domain is boxed.

[0152] FIG. 121. The amino acid sequence of SEQ ID NO: 352. The conserved protein kinase family domain is underlined and the serine/threonine protein kinase active domain is boxed.

[0153] FIG. 122. The amino acid sequence of SEQ ID NO: 354. The conserved basic-leucine zipper (bZIP) transcription factor domain is underlined and the basic-leucine zipper (bZIP) domain signature is boxed.

[0154] FIG. 123. The amino acid sequence of SEQ ID NO: 355. The conserved basic-leucine zipper (bZIP) transcription factor domain is underlined and the basic-leucine zipper (bZIP) domain signature is boxed.

[0155] FIG. 124. The amino acid sequence of SEQ ID NO: 356. The conserved basic-leucine zipper (bZIP) transcription factor domain is underlined and the basic-leucine zipper (bZIP) domain signature is boxed.

[0156] FIG. 125. The amino acid sequence of SEQ ID NO: 357. The conserved basic-leucine zipper (bZIP) transcription factor domain is underlined and the basic-leucine zipper (bZIP) domain signature is boxed.

[0157] FIG. 126. The amino acid sequence of SEQ ID NO: 358. The conserved basic-leucine zipper (bZIP) transcription factor domain is underlined and the basic-leucine zipper (bZIP) domain signature is boxed.

[0158] FIG. 127. The amino acid sequence of SEQ ID NO: 359. The conserved basic-leucine zipper (bZIP) transcription factor domain is underlined and the basic-leucine zipper (bZIP) domain signature is boxed.

[0159] FIG. 128. The amino acid sequence of SEQ ID NO: 360. The conserved basic-leucine zipper (bZIP) transcription factor domain is underlined and the basic-leucine zipper (bZIP) domain signature is boxed.

[0160] FIG. 129. The amino acid sequence of SEQ ID NO: 361. The conserved basic-leucine zipper (bZIP) transcription factor domain is underlined and the basic-leucine zipper (bZIP) domain signature is boxed.

[0161] FIG. 130. The amino acid sequence of SEQ ID NO: 362. The conserved 14-3-3 family domain is underlined and the 14-3-3 proteins signature 1 is boxed.

[0162] FIG. 131. The amino acid sequence of SEQ ID NO: 363. The conserved 14-3-3 family domain is underlined and the 14-3-3 proteins signature 1 is boxed.

[0163] FIG. 132. The amino acid sequence of SEQ ID NO: 364. The conserved 14-3-3 family domain is underlined and the 14-3-3 proteins signature 1 is boxed.

[0164] FIG. 133. The amino acid sequence of SEQ ID NO: 365. The conserved 14-3-3 family domain is underlined and the 14-3-3 proteins signature 1 is boxed.

[0165] FIG. 134. The amino acid sequence of SEQ ID NO: 366. The conserved 14-3-3 family domain is underlined and the 14-3-3 proteins signature 1 is boxed.

[0166] FIG. 135. The amino acid sequence of SEQ ID NO: 367. The conserved 14-3-3 family domain is underlined and the 14-3-3 proteins signature 1 is boxed.

[0167] FIG. 136. The amino acid sequence of SEQ ID NO: 368. The conserved 14-3-3 family domain is underlined and the 14-3-3 proteins signature 1 is boxed.

[0168] FIG. 137. The amino acid sequence of SEQ ID NO: 369. The conserved basic-leucine zipper (bZIP) transcription factor domain is underlined and the basic-leucine zipper (bZIP) domain signature is boxed.

[0169] FIG. 138. The amino acid sequence of SEQ ID NO: 370. The conserved 14-3-3 family domain is underlined and the 14-3-3 proteins signature 1 is boxed.

[0170] FIG. 139. The amino acid sequence of SEQ ID NO: 371. The conserved 14-3-3 family domain is underlined and the 14-3-3 proteins signature 1 is boxed.

[0171] FIG. 140. The amino acid sequence of SEQ ID NO: 372. The conserved protein kinase family domain is underlined and the serine/threonine protein kinase active domain is boxed.

[0172] FIG. 141. The amino acid sequence of SEQ ID NO: 373. The conserved protein kinase family domain is underlined and the serine/threonine protein kinase active domain is boxed.

[0173] FIG. 142. The amino acid sequence of SEQ ID NO: 374. The conserved protein kinase family domain is underlined and the serine/threonine protein kinase active domain is boxed.

[0174] FIG. 143. The amino acid sequence of SEQ ID NO: 379. The conserved C-x8-C-x5-C-x3-H type Zn-finger domains are underlined and the conserved cysteine and histidine residues are boxed.

[0175] FIG. 144. The amino acid sequence of SEQ ID NO: 380. The conserved C-terminus of the remorin family domain is underlined.

[0176] FIG. 145. Representative experiment showing Arabidopsis FT-mediated floral induction in C. moschata with ZYMV-FT (FIG. 145B) in comparison with the control ZYMV-GFP (FIG. 145A).

[0177] FIG. 146 shows flowering induction in C. moschata inoculated at different ages with ZYMV-FT (FIG. 146A) and ZYMV-CO (FIG. 146B). No flowering was observed in the control plants under these conditions (FIG. 146C).

[0178] FIG. 147 is a diagram showing the general location of the PEBP binding site in the FT gene and proposed florigen signal-generating region.

[0179] FIG. 148. Effect on flowering induced in Arabidopsis thaliana by C. maxima FT when expressed as a transgene under the control of a companion cell-specific promoter.

[0180] FIG. 149. Effect on flowering induced in Arabidopsis thaliana by miRNA158 when expressed as a transgene under the control of a companion cell-specific promoter.

[0181] FIGS. 150A and B show the timing of floral induction following ZYMV-mediated expression of Arabidopsis FT. Cucurbita moschata PI441726 was maintained under non-inductive (FIG. 150A) or inductive (FIG. 150B) conditions. Under both inductive and non-inductive conditions, ZYMV/AtFT induced early bud formation and floral initiation. Results are expressed as percentage of plants (n=5-9) forming floral buds>10-20 mm in length at each node at each time point (21, 28 and 40 days post infection (dpi)). ZYMV-mediated AtFT (dashed bars), ZYMV/GFP (white bars) or ZYMV control (empty cassette; black bars) are indicated.

[0182] FIG. 151 shows real-time RT-PCR analysis of CmFTL1, CmFTL2, CmrbcS and CmPP16 transcript levels in vascular tissue excised from mature stems of 4- through 12-week-old pumpkin plants. Floral buds were first detected on 5-week-old plants. Transcript abundance is expressed as a ratio with CmPP16, which was set arbitrarily at 100. RNA was extracted from phloem sap collected from 2 to 3 pm. The figure shows representative data from three independent experiments.

[0183] FIG. 152A shows the time course of CmFTL1, CmFTL2, CmrbcS and CmPP16 expression in vascular tissue excised from mature stems of 6-week-old pumpkin plants. Transcript abundance is expressed as a ratio with CmPP16, which was set arbitrarily at 100. FIG. 152B shows real-time RT-PCR analysis of CmFTL1, CmFTL2, CmrbcS and CmPP16 levels in phloem sap collected from mature stems of 6-week-old pumpkin plants. Transcript abundance is expressed as a ratio with CmPP16, which was set arbitrarily at 1000. Note that CmFTL1 and CmFTL2 transcripts were not detected in phloem sap at a level 10 times lower than represented by CmrbcS contamination. Representative data from three independent experiments.

[0184] FIGS. 153A-D show pumpkin fast protein liquid chromatography-fractionated proteins interrogated by mass spectroscopy for CmFTL1 and CmFTL2. FIGS. 153A and 153C: Proteins extracted from C. maxima stem vascular tissue (A) and phloem sap (C) were separated using cation-exchange FPLC and aliquots of each elution fraction (E1-E11) were separated by SDS-PAGE. The 20 kDa region associated with each elution fraction was excised, from individually run gels, for in-gel tryptic-digest, followed by tandem MS analysis. FIGS. 153B and D: Fractions E4 to E10 from vascular tissue (B) or phloem sap (D) were pulled and then resolved on SDS-PAGE. Rectangular boxes indicate the regions that were excised for in-gel tryptic-digest, followed by tandem MS analysis.

[0185] FIGS. 154A and B illustrate mass spectroscopy characterization of CmFTL1 and CmFTL2 peptides. FIG. 154A: Tandem MS spectrum of doubly protonated VIGDVVDSFSR (m/z 597.3116; SEQ ID NO: 873) from the CmFTL1 protein. Almost all y and b series fragments were observed. Specific fragment peaks, e.g., y₂˜y₅ and b₆˜b₁₀, clearly differentiate this spectrum from that obtained for VIGDVIDSFTK (SEQ ID NO: 874; FIG. 154B). The y₅ fragment at m/z 611.4 is very intense and explicable only on the basis of this peptide fragment. Inset mass spectrum shows parent ion scan obtained with LTQ-FT. Here, the mass difference with the theoretical mass was only 1.9 ppm, which is within the 10 ppm experimental error range typical for the LTQ-FT. The mass difference with the theoretical mass of VIGDVIDSFTK (m/z 597.3242) was 19 ppm, well beyond the instrument error.

[0186] FIG. 154B: Tandem MS spectrum of doubly protonated VIGDVIDSFTK (m/z 597.3242; SEQ ED NO: 874) from the CmFTL2 protein. All the b and y series fragment ions were clearly observed, except for b₆ (m/z 597.4) and y₅ (m/z 597.3) that have almost the same mass as the parent ion and are unstable in the tandem MS condition, and b₁ and y₁ ion that must have been discriminated out due to low mass cut off by ion trap mass spectrometer. Inset mass spectrum shows parent scan obtained with LTQ-FT. Mass difference with the theoretical mass was only 2.5 ppm, which is within the typical experimental error range of 10 ppm of this instrument confirming the sequence is correct while mass difference with the theoretical mass of VIGDVVDSFSR (SEQ ID NO: 873; m/z 597.3116) was 25 ppm, well beyond the instrument error.

[0187] FIGS. 155A-I illustrate the relative abundance of CmFTL1 and CmFTL2 in pumpkin vascular tissue determined by LC-MS/MS chromatography. FIG. 155A total ion chromatogram from a full survey scan, FIG. 155B single ion chromatogram from SIM of m/z597, and FIG. 155C fragmentation ion chromatogram (m/z 981) from tandem MS of ml/z 597 obtained from FPLC-fractionated vascular tissue proteins (20 kDa band) and a retention time (Rt) of 40-55 min. Chromatographic peaks or eluting positions for CmFTL1 peptide fragment VIGDVVDSFSR (SEQ ID NO: 873; SR) and CmFTL2 fragment VIGDVIDSFTK (SEQ ID NO: 874; TK) are marked with circles. FIG. 155D full mass spectrum survey scan, FIG. 155E single ion scan of m/z597, and FIG. 155F tandem MS of m/z 597 for the SR peptide eluting at a Rt of 41.6 min. FIG. 155G full mass spectrum survey scan, FIG. 155H single ion scan of m/z597, and FIG. 155I tandem MS of m/z 597 for the SK peptide eluting at a Rt of 49.2 min.

[0188] FIGS. 156A-I illustrate the relative abundance of CmFTL1 and CmFTL2 in pumpkin phloem sap determined by LC-MS/MS chromatography. FIG. 156A total ion chromatogram from a full survey scan, FIG. 156B single ion chromatogram from SIM of m/z 597, and FIG. 156C fragmentation ion chromatogram (m/z 981) from tandem MS of m/z 597 obtained from FPLC-fractionated phloem sap proteins (20 kDa band) and a retention time (Rt) of 40-55 min. Chromatographic peaks or eluting positions for CmFTL1 peptide fragment VIGDVVDSFSR (SEQ ID NO: 873; SR) and CmFTL2 fragment VIGDVIDSFTK (SEQ ID NO: 874; TK) are marked with circles. FIG. 156D full mass spectrum survey scan, FIG. 156E single ion scan of m/z 597, and FIG. 156F tandem MS of m/z 597 for the SR peptide eluting at a Rt of 41.9 min. FIG. 156G full mass spectrum survey scan, FIG. 156H single ion scan of m/z597, and FIG. 156I tandem MS of m/z 597 for the TK peptide eluting at a Rt of 49.2 min.

### DETAILED DESCRIPTION

[0189] Previous studies on photoperiodic induction of flowering have shown that perception of a favorable photoperiod occurs in the leaf and involves phytochrome pigments (Blazquez J. Cell Science 113:3547-3548 (2000); Koorneef et al., Annu. Rev. Plant Physiol. Plant Mol. Biol. 49:345-370 (1998)). Grafting studies provided evidence that a flower-inducing signal is produced in the stimulated leaf and is capable of moving through a graft junction to initiate flowering in the SAM of an unstimulated scion (recipient tissue) grafted to a stimulated stock (perception and production tissue). Genetic studies have identified transcription factors and their target gene pathways in the meristem cells that are involved in floral evocation. The mechanisms of cell-to-cell communication and the role of the phloem transport system in systemic transport of macromolecules between source and sink tissues are under active investigation by a number of laboratories. While it is certain that florigenic signaling is initiated by the perception of an appropriate stimulus by the leaf and culminates in the induction of the flowering response in the SAM, the identity of the florigenic signal(s) and the process by which a florigenic signal is communicated from the leaf to the meristematic target tissues (shoot apical meristem, lateral meristem) have not yet been elucidated.

[0190] The present invention describes a florigen signaling system involving a multistep pathway in which the companion cell (CC) of the phloem plays a central role, together with methods of modulating the system components. By analogy with a transmitter element in a communication network, the companion cell is responsible for converting the signal it receives from the leaf sensor cells to a transmissible form which can be propagated in a long-distance communication channel for arrival at an appropriate time and destination point, and in a manner that preserves the information content and intensity of the signal at its point of reception. In this conception, the companion cell is viewed both as the supplier of components required for long-distance systemic transmission of a flower-inducing stimulus from the leaf to the SAM and as a selectivity filter for ensuring that signal-to-noise ratio of the transmission is adequate.

[0191] FIG. 1 depicts the florigenic signaling pathway, in which the activation of a signaling cascade in the companion cell gives rise to a concatenated response leading to the induction of flowering. For illustrative purposes, it is assumed that the pathway described below is initiated by photoperiodic induction. However, it is understood that other florigenic inducers, both biotic and abiotic, also operate via this pathway.

[0192] As shown in FIG. 1 (step A), the primary stimulus is perceived by a sensor cell in the leaf. The sensor cell perceives short-/long-day conditions via a phytochrome-based circadian clock and generates a signal within one or more cell types present in the leaf (the epidermal, mesophyll, bundle sheath and vascular cells). The signal is relayed to the companion cell (CC) of the functional phloem (step B). The nature of this transmission process and the form which the signal takes is presently unknown. For purposes of the present model, it is presumed that the information is encoded in a chemical molecule, and that the perception of the signal by the CC (step C) involves the recognition and binding of this molecule to a cognate binding partner in or on the CC. The signal may comprise a transcription factor that acts directly on the transcriptional machinery of the CC to activate a florigen-specific pathway, or may act indirectly via a signal cascade mechanism (step D). The florigen-specific pathway involves a suite of genes whose encoded products render the signal transmissible for long-distance delivery. The phrase “renders the signal transmissible” is intended to encompass the production of a long-distance florigen signaling component and/or signaling complex (LDFSC).

[0193] The transmissible long-distance flower-inducing stimulus is referred to herein as a “long-distance florigenic signaling component” or “LDFSC”. This term is intended to encompass regulatory molecules, or complexes containing regulatory molecules, which act directly or indirectly to induce the floral transition. The accessory components that function, for example, in the delivery of a florigenic signal from the companion cell to the plasmodesmal system, in stabilization of the florigenic signal during phloem transport, and in unloading of the florigenic signal from the terminal phloem for delivery to the apical meristem are considered to comprise LDFSC, but may also be involved in other types of long-distance signaling processes.

[0194] The LDFSC enters the functional, enucleate, sieve tube system (step E), which acts as the conduit for the delivery of the LDFSC to the shoot apex. The LDFSC is a protein/derivative, protein-hormone complex, nucleoprotein, peptide/derivative, a single-stranded or double-stranded nucleic acid molecule/derivative, or a combination of any of the foregoing in covalent or non-covalent linkage. The term “derivative” refers to an LDFSC that is structurally modified by biochemical, chemical, recombinant or genetic techniques.

[0195] The CC-SE complexes along the phloem translocation pathway provide a relay system for regenerating and amplifying the LDFSC during the translocation process (step E). The function and location of the regenerating and/or amplifying system in the CC-SE complex depends on the biochemical characteristics of the LDFSC. For example, if the LDFSC is an RNA molecule that serves as its own template for replication, the replicative machinery, or part thereof, may be cotransported with it in the phloem. For LDFSC that requires de novo transcription or translation, the relay mechanism is likely to be a highly regulated process involving the shuttling of the LDFSC back and forth between the phloem and the CC during translocation.

[0196] The egress of the LDFSC at the terminal phloem (sieve tubes) involves at least one of the following processes: (i) targeted transport through plasmodesmata into CCs or neighboring phloem parenchyma; (ii) activation of a secondary relay in vascular cells which propagates via plasmodesmata and/or the apoplasm to the SAM and initiates floral development (steps F-H); and (iii) direct transfer of the LDFSC through the apex via PD or the apoplasm into the SAM (step I) to initiate floral development. The mechanism is likely to depend on such factors as the molecular size and shape of the LDFSC in relation to the size exclusion limit (SEL) of plasmodesmata and/or movement via the apoplasm in postphloem tissues, whether specific signals are present for targeting the LDFSC to the meristem or retaining it in the SE-CC complex, and whether the LDFSC requires conversion into a different form for cell-to-cell transport or for activation of the vegetative to floral transition in the SAM. For a general review of phloem transport and unloading of macromolecules, see Oparka and Santa Cruz, Annu. Rev. Plant Physiol. Plant Mol. Biol. 51: 323-47 (2000) and Schobert, C., Lucas, W. J., Franceschi, V. R., and Frommer, W. B. (2000) Intercellular transport and phloem loading of sucrose, oligosaccharides and amino acids. Advances in Photosynthesis, Vol. 9, Photosynthesis: Physiology and Metabolism, eds. R. C. Leegood, T. D. Sharkey and S. von Caemmerer, pp. 249-274.

[0197] In certain embodiments, the present invention provides methods for: (1) identifying the LDFSC and other genes in the florigenic signaling cascade; (2) modifying the occurrence, timing and extent of flower development by modulating the florigenic signaling pathway; and (3) screening for inducers, repressors and modulators of florigenic signaling.

[0198] In one of its aspects, the invention provides a method for identifying a candidate flowering control gene in the long-distance florigenic signaling pathway. The method comprises: comparing the gene transcripts or transcription products in the phloem sap of florally induced and noninduced plants, and identifying a product that is differentially expressed during the floral transition.

[0199] In a related aspect, the invention provides a method of isolating an LDFSC, which comprises exposing a plant or heterograft to a flowering stimulus, identifying a gene transcript or transcription product that appears in the phloem sap, and ascertaining the ability of the gene product to affect floral induction in a plant.

[0200] The phrase “gene transcript or transcription product” refers to all products that are derived from the expression of a gene, including, for example, RNA and polypeptide molecules that are processed from precursor molecules or are otherwise modified after transcription and/or translation.

[0201] The invention further provides isolated polynucleotide sequences from cucurbits, Arabidopsis and Festuca species that encode putative regulators of long-distance florigenic signalling, together with the corresponding amino acid sequences.

[0202] The term “polynucleotide(s),” as used herein, means a single or double-stranded polymer of deoxyribonucleotide or ribonucleotide bases and includes DNA and corresponding RNA molecules, including HnRNA and mRNA molecules, both sense and anti-sense strands, and comprehends cDNA, genomic DNA and recombinant DNA, as well as wholly or partially synthesized polynucleotides. An HnRNA molecule contains introns and corresponds to a DNA molecule in a generally one-to-one manner. An mRNA molecule corresponds to an HnRNA and DNA molecule from which the introns have been excised. A polynucleotide may consist of an entire gene, or any portion thereof. Operable anti-sense polynucleotides may comprise a fragment of the corresponding polynucleotide, and the definition of “polynucleotide” therefore includes all such operable anti-sense fragments. Anti-sense polynucleotides and techniques involving anti-sense polynucleotides are well known in the art and are described, for example, in Robinson-Benion et al., Methods in Enzymol. 254: 363-375, 1995 and Kawasaki et al., Artific. Organs 20: 836-848, 1996.

[0203] Polynucleotides that comprise complements of such polynucleotide sequences, reverse complements of such polynucleotide sequences, or reverse sequences of such polynucleotide sequences, together with variants of such sequences, are also provided. The definitions of the terms “complement”, “reverse complement” and “reverse sequence”, as used herein, are best illustrated by the following example. For the sequence 5′ AGGACC 3′, the complement, reverse complement and reverse sequence are as follows:

| | |
|---|---|
| complement | 3′ TCCTGG 5′ |
| reverse complement | 3′ GGTCCT 5′ |
| reverse sequence | 5′ CCAGGA 3′. |

[0204] Preferably, sequences that are complements of a specifically recited polynucleotide sequence are complementary over the entire length of the specific polynucleotide sequence.

[0205] As used herein, the term “variant” comprehends nucleotide or amino acid sequences different from the specifically identified sequences, wherein one or more nucleotides or amino acid residues is deleted, substituted, or added. Variants may be naturally occurring allelic variants, or non-naturally occurring variants. Variant sequences (polynucleotide or polypeptide) preferably exhibit at least 75%, more preferably at least 80%, more preferably at least 85%, more preferably yet at least 90%, and most preferably at least 95% or 98% identity to a specific sequence disclosed herein. The percentage identity is determined by aligning the two sequences to be compared as described below, determining the number of identical residues in the aligned portion, dividing that number by the total number of residues in the inventive (queried) sequence, and multiplying the result by 100.

[0206] Polynucleotide and polypeptide sequences having a specified percentage identity to a polynucleotide or polypeptide disclosed herein share a high degree of similarity in their primary structure. In addition to a specified percentage identity to a polynucleotide or polypeptide of the present invention, variant polynucleotides and polypeptides preferably have additional structural and/or functional features in common with a polynucleotide or polypeptide of the present invention. Polynucleotides having a specified degree of identity to, or capable of hybridizing to, a polynucleotide of the present invention preferably additionally have at least one of the following features: (1) they contain an open reading frame, or partial open reading frame, encoding a polypeptide, or a functional portion of a polypeptide, having substantially the same functional properties as the polypeptide, or functional portion thereof, encoded by a polynucleotide in a recited SEQ ID NO; or (2) they contain identifiable domains in common.

[0207] Polynucleotide or polypeptide sequences may be aligned, and percentages of identical nucleotides or amino acids in a specified region may be determined against another polynucleotide or polypeptide, using computer algorithms that are publicly available. The BLASTN and FASTA algorithms, set to the default parameters described in the documentation and distributed with the algorithm, may be used for aligning and identifying the similarity of polynucleotide sequences. The alignment and similarity of polypeptide sequences may be examined using the BLASTP algorithm. BLASTX and FASTX algorithms compare nucleotide query sequences translated in all reading frames against polypeptide sequences. The FASTA and FASTX algorithms are described in Pearson and Lipman, Proc. Natl. Acad. Sci. USA 85:2444-2448, 1988; and in Pearson, Methods in Enzymol. 183:63-98, 1990. The FASTA software package is available from the University of Virginia by contacting the Assistant Provost for Research, University of Virginia, PO Box 9025, Charlottesville, Va. 22906-9025. The BLASTN software is available from the National Centre for Biotechnology Information (NCBI), National Library of Medicine, Building 38A, Room 8N805, Bethesda, Md. 20894. The BLASTN algorithm Version 2.0.11 [Jan-20-2000] set to the default parameters described in the documentation and distributed with the algorithm, is preferred for use in the determination of polynucleotide variants according to the present invention. The use of the BLAST family of algorithms, including BLASTN, BLASTP and BLASTX, is described in the publication of Altschul et al., “Gapped BLAST and PSI-BLAST: a new generation of protein database search programs,” Nucleic Acids Res. 25:3389-3402, 1997.

[0208] The following running parameters are preferred for determination of alignments and similarities using BLASTN that contribute to the E values and percentage identity for polynucleotides: Unix running command with the following default parameters: blastall -p blastn -d embldb -e 10 -G 0 -E 0 -r 1 -v 30 -b 30 -i queryseq -o results; and parameters are: -p Program Name [String]; -d Database [String]; -e Expectation value (E) [Real]; -G Cost to open a gap (zero invokes default behavior) [Integer]; -E Cost to extend a gap (zero invokes default behavior) [Integer]; -r Reward for a nucleotide match (BLASTN only) [Integer]; -v Number of one-line descriptions (V) [Integer]; -b Number of alignments to show (B) [Integer]; -i Query File [File In]; -o BLAST report Output File [File Out] Optional.

[0209] The following running parameters are preferred for determination of alignments and similarities using BLASTP that contribute to the E values and percentage identity of polypeptide sequences: blastall -p blastp -d swissprotdb -e 10 -G 0 -E 0 -v 30 -b 30 -i queryseq -o results; the parameters are: -p Program Name [String]; -d Database [String]; -e Expectation value (E) [Real]; -G Cost to open a gap (zero invokes default behavior) [Integer]; -E Cost to extend a gap (zero invokes default behavior) [Integer]; -v Number of one-line descriptions (v) [Integer]; -b Number of alignments to show (b) [Integer]; -I Query File [File In]; -o BLAST report Output File [File Out] Optional.

[0210] The “hits” to one or more database sequences by a queried sequence produced by BLASTN, BLASTP, FASTA, or a similar algorithm, align and identify similar portions of sequences. The hits are arranged in order of the degree of similarity and the length of sequence overlap. Hits to a database sequence generally represent an overlap over only a fraction of the sequence length of the queried sequence.

[0211] As noted above, the percentage identity of a polynucleotide or polypeptide sequence is determined by aligning polynucleotide and polypeptide sequences using appropriate algorithms, such as BLASTN or BLASTP, respectively, set to default parameters; identifying the number of identical nucleic or amino acids over the aligned portions; dividing the number of identical nucleic or amino acids by the total number of nucleic or amino acids of the polynucleotide or polypeptide of the present invention; and then multiplying by 100 to determine the percentage identity. By way of example, a queried polynucleotide having 220 nucleic acids has a hit to a polynucleotide sequence in the EMBL database having 520 nucleic acids over a stretch of 23 nucleotides in the alignment produced by the BLASTN algorithm using the default parameters. The 23-nucleotide hit includes 21 identical nucleotides, one gap and one different nucleotide. The percentage identity of the queried polynucleotide to the hit in the EMBL database is thus 21/220 times 100, or 9.5%. The percentage identity of polypeptide sequences may be determined in a similar fashion.

[0212] The BLASTN and BLASTX algorithms also produce “Expect” values for polynucleotide and polypeptide alignments. The Expect value (E) indicates the number of hits one can “expect” to see over a certain number of contiguous sequences by chance when searching a database of a certain size. The Expect value is used as a significance threshold for determining whether the hit to a database indicates true similarity. For example, an E value of 0.1 assigned to a polynucleotide hit is interpreted as meaning that in a database of the size of the EMBL database, one might expect to see 0.1 matches over the aligned portion of the sequence with a similar score simply by chance. By this criterion, the aligned and matched portions of the sequences then have a probability of 90% of being related. For sequences having an E value of 0.01 or less over aligned and matched portions, the probability of finding a match by chance in the EMBL database is 1% or less using the BLASTN algorithm. E values for polypeptide sequences may be determined in a similar fashion using various polypeptide databases, such as the SwissProt database.

[0213] According to one embodiment, “variant” polynucleotides and polypeptides, with reference to each of the polynucleotides and polypeptides of the present invention, preferably comprise sequences having the same number or fewer nucleotides or amino acids than each of the polynucleotides or polypeptides of the present invention and producing an E value of 0.01 or less when compared to the polynucleotide or polypeptide of the present invention. That is, a variant polynucleotide or polypeptide is any sequence that has at least a 99% probability of being related to the polynucleotide or polypeptide of the present invention, measured as having an E value of 0.01 or less using the BLASTN or BLASTX algorithms set at the default parameters. According to a preferred embodiment, a variant polynucleotide is a sequence having the same number or fewer nucleic acids than a polynucleotide of the present invention that has at least a 99% probability of being related to the polynucleotide of the present invention, measured as having an E value of 0.01 or less using the BLASTN algorithm set at the default parameters. Similarly, according to a preferred embodiment, a variant polypeptide is a sequence having the same number or fewer amino acids than a polypeptide of the present invention that has at least a 99% probability of being related as the polypeptide of the present invention, measured as having an E value of 0.01 or less using the BLASTP algorithm set at the default parameters.

[0214] In an alternative embodiment, variant polynucleotides are sequences that hybridize to a polynucleotide of the present invention under stringent conditions. Stringent hybridization conditions for determining complementarity include salt conditions of less than about 1 M, more usually less than about 500 mM, and preferably less than about 200 mM. Hybridization temperatures can be as low as 5° C., but are generally greater than about 22° C., more preferably greater than about 30° C., and most preferably greater than about 37° C. Longer DNA fragments may require higher hybridization temperatures for specific hybridization. Since the stringency of hybridization may be affected by other factors such as probe composition, presence of organic solvents, and extent of base mismatching, the combination of parameters is more important than the absolute measure of any one alone. An example of “stringent conditions” is prewashing in a solution of 6×SSC, 0.2% SDS; hybridizing at 65° C., 6×SSC, 0.2% SDS overnight; followed by two washes of 30 minutes each in 1×SSC, 0.1% SDS at 65° C. and two washes of 30 minutes each in 0.2×SSC, 0.1% SDS at 65° C.

[0215] The present invention also encompasses polynucleotides that differ from the disclosed sequences but that, as a consequence of the discrepancy of the genetic code, encode a polypeptide having similar enzymatic activity to a polypeptide encoded by a polynucleotide of the present invention. Thus, polynucleotides comprising sequences that differ from the specific polynucleotide sequences disclosed herein, or complements, reverse sequences, or reverse complements of those sequences, as a result of conservative substitutions are contemplated by and encompassed within the present invention.

[0216] Additionally, polynucleotides comprising sequences that differ from the specific polynucleotide sequences disclosed herein, or complements, reverse complements or reverse sequences thereof, as a result of deletions and/or insertions totaling less than 10% of the total sequence length are also contemplated by and encompassed within the present invention.

[0217] Similarly, polypeptides comprising sequences that differ from the specific polypeptide sequences disclosed herein as a result of amino acid substitutions, insertions, and/or deletions totaling less than 10% of the total sequence length are contemplated by and encompassed within the present invention, provided the variant polypeptide has functional properties which are substantially the same as, or substantially similar to, those of the specific polypeptide disclosed herein.

[0218] Table 1, below, provides additional information about specific polynucleotide sequences disclosed herein. These polynucleotide sequences are identified in the Sequence Listing as SEQ ID NO: 1-25, 119-151, 271-298, 375-378 and 559-636 (cucurbits); SEQ ID NO: 51-75, 185-217, 299-322 and 403-480 (Arabidopsis orthologs); and SEQ ID NO: 715-792 (Festuca arundinacea orthologs). Their encoded polypeptide sequences are identified respectively as SEQ ID NO: 26-50, 152-184, 323-350, 379, 380 and 637-714 (cucurbits); SEQ ID NO: 76-100, 218-250, 351-374 and 481-558 (Arabidopsis orthologs): and SEQ ID NO: 793-870 (Festuca arundinacea orthologs). SEQ ID NO: 132 and 165 are, respectively, the polynucleotide and encoded polypeptide sequence of a first C. maxima FT, referred to as CmFTL1; SEQ ID NO: 871 and 872 are, respectively, the polynucleotide and encoded polypeptide sequence of a second C. maxima FT, referred to as CmFTL2; and SEQ ID NO: 198 and 231 are, respectively, the polynucleotide and encoded polypeptide sequence of A. thaliana FT.

[0219] All of the polynucleotides and polypeptides described herein are isolated and purified, as those terms are commonly used in the art. Preferably, the polypeptides and polynucleotides are at least about 80% pure, more preferably at least about 90% pure, and most preferably at least about 99% pure.

[0220] As used herein, the term “polypeptide” encompasses amino acid chains of any length, including full-length proteins, wherein the amino acid residues are linked by covalent peptide bonds. The term “polypeptide encoded by a polynucleotide” as used herein, includes polypeptides encoded by a polynucleotide that comprises a partial isolated polynucleotide sequence provided herein. Polypeptides of the present invention may be naturally purified products, or may be produced partially or wholly using recombinant techniques.

[0221] Polypeptides of the present invention may be produced recombinantly by inserting a polynucleotide sequence of the present invention encoding the polypeptide into an expression vector and expressing the polypeptide in an appropriate host. Any of a variety of expression vectors known to those of ordinary skill in the art may be employed. Expression may be achieved in any appropriate host cell that has been transformed or transfected with an expression vector containing a polynucleotide molecule that encodes a recombinant polypeptide. Suitable host cells include prokaryotes, yeast, and higher eukaryotic cells. Preferably, the host cells employed are plant, E. coli, insect, yeast, or a mammalian cell line such as COS or CHO. The polynucleotide sequences expressed in this manner may encode naturally occurring polypeptides, portions of naturally occurring polypeptides, or other variants thereof The expressed polypeptides may be used in various assays known in the art to determine their biological activity. Such polypeptides may also be used to raise antibodies, to isolate corresponding interacting proteins or other compounds, and to quantitatively determine levels of interacting proteins or other compounds.

TABLE 1

| Polynucleotide | Polypeptide | |
|---|---|---|
| SEQ ID NO: | SEQ ID NO: | Homology |
| 1, 51 | 26, 76 | Leafy (LHY) protein that plays a role in flower |
| | | meristem identity. |
| 2, 3, 52, 53 | 27, 28, 77, 78 | Regulator identified in the phloem |
| 4, 54 | 29, 79 | SEUSS transcriptional co-regulator |
| 5, 55 | 30, 80 | Zinc finger transcription factor that plays a role in |
| | | regulating gene transcription |
| 6, 56 | 31, 81 | AP2 domain transcription factor that plays a role |
| | | in regulating gene transcription |
| 7, 57 | 32, 82 | NAM/CUC2-like protein that plays a role in |
| | | regulating gene transcription |
| 8, 58 | 33, 83 | Ripening-related bZIP transcription factor that |
| | | plays a role in regulating gene transcription |
| 9, 59 | 34, 84 | C3H-type zinc finger transcription factor that |
| | | plays a role in regulating gene transcription |
| 10, 60 | 35, 85 | Ethylene responsive element binding factor 4 |
| | | (AtERF4) that plays a role in regulating gene |
| | | transcription |
| 11, 61 | 36, 86 | Auxin response factor 9 (ARF9) that plays a role |
| | | in regulating gene transcription |
| 12, 62 | 37, 87 | Aux/IAA protein that plays a role in regulating |
| | | gene transcription |
| 13, 63 | 38, 88 | ARR2 protein that plays a role in regulating gene |
| | | transcription |
| 14, 64 | 39, 89 | Heat shock transcription factor that plays a role in |
| | | regulating gene transcription |
| 15, 65 | 40, 90 | WRKY-type DNA binding protein that plays a |
| | | role in regulating gene transcription |
| 16, 66 | 41, 91 | F4H5 |
| 17, 67 | 42, 92 | Regulator identified in the phloem |
| 18, 68 | 43, 93 | Transcription factor that plays a role in regulating |
| | | gene transcription |
| 19, 69 | 44, 94 | Transcription factor that plays a role in regulating |
| 1, 51 | 26, 76 | Leafy (LHY) protein that plays a role in flower |
| | | meristem identity. |
| | | gene transcription |
| 20, 70 | 45, 95 | Regulator identified in the phloem |
| 21, 71 | 46, 96 | Nam-like transcription factor that plays a role in |
| | | regulating gene transcription |
| 22, 72 | 47, 97 | Avr9/Cf-9 rapidly elicited protein that plays a |
| | | role in regulating gene transcription |
| 23, 73 | 48, 98 | Stress-responsive zinc finger protein ZPT2-11 |
| | | that plays a role in regulating gene transcription |
| 24, 74 | 49, 99 | Nam-like transcription factor that plays a role in |
| | | regulating gene transcription |
| 25, 75 | 50, 100 | WRKY-type DNA binding protein that plays a |
| | | role in regulating gene transcription |
| 119, 185 | 152, 218 | Plays a role in regulating chromatin structure and |
| | | epigenetic functions |
| 120, 186 | 153, 219 | Transcription factor that plays a role in regulating |
| | | gene transcription |
| 121, 187 | 154, 220 | Plays a role in small RNA metabolism |
| 122, 188 | 155, 221 | Regulator identified in the phloem |
| 123-125, 189-191 | 156-158, 222-224 | Transcription factor that plays a role in regulating |
| | | gene transcription |
| 126, 192 | 159, 225 | Transcription factor that plays a role in regulating |
| | | chromatin structure and epigenetic functions |
| 127, 128, 193, | 160, 161, 226, | Transcription factor that plays a role in regulating |
| 194 | 227 | gene transcription |
| 129, 195 | 162, 228 | Plays a role in regulating chromatin structure and |
| | | epigenetic functions |
| 130, 196 | 163, 229 | Plays a role in regulating chromatin structure and |
| | | epigenetic functions |
| 131, 197 | 164, 230 | Transcription factor that plays a role in regulating |
| | | gene transcription |
| 132, 198, 871 | 165, 231, 872 | Flowering Locus T (FT) that plays a role in |
| | | regulation of flowering in plants |
| 133, 199 | 166, 232 | Plays a role in regulating chromatin structure and |
| | | epigenetic functions |
| 134, 200 | 167, 233 | Plays a role in small RNA metabolism |
| 135-137, 201-203 | 168-170, 234-236 | Plays a role in regulating chromatin structure and |
| | | epigenetic functions |
| 138, 204 | 171, 237 | Transcription factor that plays a role in regulating |
| | | gene transcription |
| 139, 140, 205, | 172, 173, 238, | Plays a role in regulating chromatin structure and |
| 206 | 239 | epigenetic functions |
| 1, 51 | 26, 76 | Leafy (LHY) protein that plays a role in flower |
| | | meristem identity. |
| 141, 207 | 174, 240 | Transcription factor that plays a role in regulating |
| | | gene transcription |
| 142, 208 | 175, 241 | Plays role in carbohydrate metabolism |
| 143, 144, 209, | 176, 177, 242, | Plays a role in regulating chromatin structure and |
| 210 | 243 | epigenetic functions |
| 145, 211 | 178, 244 | SPINDLY protein that plays a role in the |
| | | gibberelin signaling pathway |
| 146, 212 | 179, 245 | GIGANTEA protein that plays a role as output |
| | | from the circadian clock |
| 147-149, 213-215 | 180-182, 246-248 | Plays a role in regulating chromatin structure and |
| | | epigenetic functions |
| 150, 216 | 183, 249 | Transcription factor that plays a role in regulating |
| | | gene transcription |
| 151, 217 | 184, 250 | Plays a role in intracellular protein transport |
| 375, 376 | 379 | Zinc finger protein that plays a role in regulating |
| | | gene transcription |
| 377, 378 | 380 | DNA binding protein that plays a role in |
| | | regulating gene transcription |

[0222] The polynucleotide sequences of SEQ ID NO: 271-322 encode regulatory molecules which include putative orthologs of SIPs described in Pneuli et al., Plant Cell 13:2687-2702 (2001). Table 2 provides additional information about these sequences.

TABLE 2

| Polynucleotide | Polypeptide | | |
|---|---|---|---|
| SEQ ID NO: | SEQ ID NO: | Homology | Plant |
| 271, 272 | 323, 324 | SPAK | Cucumis sativus |
| 273-275 | 325-327 | SPGB (bZIP) | Cucumis sativus |
| 276 | 328 | SIP4 (10 kDa) | Cucurbita maxima |
| 277-281 | 329-333 | SPGB (bZIP) | Cucurbita maxima |
| 282-284 | 334-336 | SPGB (bZIP | Sicyos angulatus |
| 285-289 | 337-341 | 14-3-3/2 | Cucumis sativus |
| 290-297 | 342-349 | 14-3-3/2 | Cucurbita maxima |
| 298 | 350 | 14-3-3/2 | Sicyos angulatus |
| 299, 300 | 351, 352 | SPAK | A. thaliana |
| 301 | 353 | SIP4 (10 kDa) | A. thaliana |
| 302-309 | 354-361 | SPGB (bZIP) | A. thaliana |
| 310-316 | 362-368 | 14-3-3/2 | A. thaliana |
| 317 | 369 | SPGB (bZIP) | A. thaliana |
| 318, 319 | 370, 371 | 14-3-3/2 | A. thaliana |
| 320-322 | 372-374 | SPAK | A. thaliana |

[0223] Genetic constructs comprising the polynucleotide sequences and host organisms comprising these constructs are also encompassed by the present invention. The term “genetic construct” refers to recombinant genetic constructs comprising, in the 5′-3′ direction, a gene promoter sequence; an open reading frame coding for at least a functional portion of a polypeptide of the present invention; and a gene termination sequence. The open reading frame may be orientated in either a sense or anti-sense direction. For applications where amplification of gene transcripts and transcription products is desired, the open reading frame may be inserted in the construct in a sense orientation, such that transformation of a target organism with the construct will lead to an increase in the number of copies of the gene and therefore an increase in the amount of gene transcripts and transcription products. When down-regulation of gene transcripts and transcription products is desired, the open reading frame may be inserted in the construct in an anti-sense orientation, such that the RNA produced by transcription of the polynucleotide is complementary to the endogenous mRNA sequence. This, in turn, will result in a decrease in the amount of gene transcription products. Alternatively, regulation may be achieved by inserting appropriate sequences or subsequences (e.g., DNA or RNA) in ribozyme constructs.

[0224] Genetic constructs comprising a non-coding region of a gene coding for a polypeptide of the present invention, or a nucleotide sequence complementary to a non-coding region, together with a gene promoter sequence and a gene termination sequence, are also provided. As used herein the term “non-coding region” includes both transcribed sequences that are not translated, and non-transcribed sequences within about 2000 base pairs 5′ or 3′ of the translated sequences or open reading frames. Examples of non-coding regions that may be usefully employed in the inventive constructs include introns and 5′-non-coding leader sequences. Transformation of a target plant with such a genetic construct may lead to a reduction in the amount of enzyme synthesized by the plant by the process of cosuppression, in a manner similar to that discussed, for example, by Napoli et al., Plant Cell 2:279-290, 1990; and de Carvalho Niebel et al., Plant Cell 7:347-358, 1995.

[0225] The genetic constructs of the present invention further comprise a gene promoter sequence and a gene termination sequence, operably linked to the polynucleotide to be transcribed, which control expression of the gene. The gene promoter sequence is generally positioned at the 5′ end of the polynucleotide to be transcribed, and is employed to initiate transcription of the polynucleotide. Gene promoter sequences are generally found in the 5′ non-coding region of a gene but they may exist in introns (Luehrsen, Mol. Gen. Genet. 225:81-93, 1991). When the construct includes an open reading frame in a sense orientation, the gene promoter sequence also initiates translation of the open reading frame. For genetic constructs comprising either an open reading frame in an anti-sense orientation or a non-coding region, the gene promoter sequence consists only of a transcription initiation site having a RNA polymerase binding site.

[0226] A variety of gene promoter sequences that may be usefully employed in the genetic constructs of the present invention are well known in the art. The promoter gene sequence, and also the gene termination sequence, may be endogenous to the host organism, e.g., target plant host, or may be exogenous, provided the promoter is functional in the target host. For example, the promoter and termination sequences may be from other plant species, plant viruses, bacterial plasmids and the like. Preferably, gene promoter and termination sequences are from the inventive sequences themselves.

[0227] Factors influencing the choice of promoter include the desired tissue specificity of the construct, and the timing of transcription and translation. For example, constitutive promoters, such as the 35S Cauliflower Mosaic Virus (CaMV 35S) promoter, will affect the activity of the enzyme in all parts of the plant. Use of a tissue specific promoter will result in production of the desired sense or anti-sense RNA only in the tissue of interest. With genetic constructs employing inducible gene promoter sequences, the rate of RNA polymerase binding and initiation can be modulated by external physical or chemical stimuli, such as light, heat, anaerobic stress, alteration in nutrient conditions and the like. Temporally regulated promoters can be employed to effect modulation of the rate of RNA polymerase binding and initiation at a specific time during development of a transformed cell.

[0228] The gene termination sequence, which is located 3′ to the polynucleotide to be transcribed, may come from the same gene as the gene promoter sequence or may be from a different gene. Many gene termination sequences known in the art may be usefully employed in the present invention, such as the 3′ end of the Agrobacterium tumefaciens nopaline synthase gene. However, preferred gene terminator sequences are those from the original gene or from the target species to be transformed. Other regulatory sequences may be included in the construct, such as transcriptional and translational enhancers.

[0229] The genetic constructs of the present invention may also contain a selection marker that is effective in plant cells, to allow for the detection of transformed cells containing the construct. Such markers, which are well known in the art, typically confer resistance to one or more toxins. One example of such a marker is the NPTII gene whose expression results in resistance to kanamycin or hygromycin, antibiotics which are usually toxic to plant cells at a moderate concentration (Rogers et al., in Weissbach A and H, eds., Methods for Plant Molecular Biology, Academic Press Inc.: San Diego, Calif., 1988). Alternatively, the presence of the desired construct in transformed cells can be determined by means of other techniques well known in the art, such as Southern and Western blots.

[0230] Techniques for operatively linking the components of the genetic constructs are well known in the art and include the use of synthetic linkers containing one or more restriction endonuclease sites as described, for example, by Sambrook et al., Molecular cloning: a laboratory manual, CSHL Press: Cold Spring Harbor, N.Y., 1989. The genetic construct of the present invention may be linked to a vector having at least one replication system, for example, E. coli, whereby after each manipulation, the resulting construct can be cloned and sequenced and the correctness of the manipulation determined.

[0231] The expression of polynucleotide sequences in target cells may be controlled by choice of the promoter sequence, or by selecting the number of functional copies or the site of integration of the polynucleotides incorporated into the genome of the target organism. A target plant may be transformed with more than one genetic construct disclosed herein, thereby modulating flowering in the plant by affecting the activity of more than one polypeptide, affecting polypeptide activity in more than one tissue and/or affecting polypeptide activity at more than one expression time. Similarly, a construct may be assembled containing more than one open reading frame coding for a polypeptide encoded by a polynucleotide of the present invention or more than one non-coding region of a gene coding for such a polypeptide. The polynucleotides of the present invention may also be employed in combination with other known sequences encoding polypeptides involved in various metabolic and biosynthetic pathways. In this manner, more than one pathway may be modulated to produce a plant having an altered flowering phenotype.

[0232] Techniques for stably incorporating DNA constructs into the genome of target plants are well known in the art and include Agrobacterium tumefaciens mediated introduction, electroporation, protoplast fusion, injection into reproductive organs, injection into immature embryos, high velocity projectile introduction and the like. The choice of technique will depend upon the target plant to be transformed.

[0233] Plants which may be transformed using the inventive constructs include both monocotyledonous angiosperms (e.g., grasses, corn, grains, oat, wheat and barley) and dicotyledonous angiosperms (e.g., Arabidopsis, tobacco, legumes, alfalfa).

[0234] FIGS. 2-48 and 50-144 show amino acid sequences annotated with their conserved InterPro domains. The annotations are based on BLASTX using the cucurbit candidate consensus nucleotide sequence (using default BLASTX parameters) to identify related (orthologous) sequences in SwissProt/TrEMBL peptide database (June 2003). The associated description of the suspected ortholog then serves to annotate the cucurbit gene. As an extra measure of confidence TBLASTN (using default parameters) is then performed using the suspected orthologous peptide sequence identified from SwissProt/TrEMBL peptide database to determine if the top reciprocal hit is the original cucurbit consensus sequence.

1. Identification of Genes Involved in the Long-Distance Florigenic Signaling Pathway

A. Characteristics of Florigen Signaling Genes

[0235] Genes involved in long-distance florigenic signaling may have one or more of the following characteristics:
[0236] (i) Gene transcription and/or activation is responsive to a flowering stimulus and occurs in phloem-containing tissues.
[0237] (ii) Changes in the level of transcripts or expressed products are required for floral induction.
[0238] (iii) Genes are differentially expressed in flowering and non-flowering plants.
[0239] (iv) The presence of post-transcriptionally modified forms (e.g., phosphorylation status) of gene products that are differentially expressed in flowering and non-flowering plants
   [0240] The presence of unique transcripts or transcription products of these genes in the phloem sap correlates with the floral transition.
[0241] (v) One or more of the gene transcripts or transcription products is able to move via the phloem and be delivered to the terminal phloem and/or the shoot apex.
[0242] (vi) At least one of the phloem-mobile gene transcripts or gene transcription products directly or indirectly affects floral induction in a plant.
   B. Plant Systems and Control of Floral Induction

[0243] Any plant that is developmentally competent to flower and undergoes flower induction under defined experimental conditions is potentially useful for identifying long distance flowering control molecules. Preferably, plants that are used are amenable to sampling of the phloem translocation stream, insofar as this permits the direct analysis of phloem-mobile gene transcripts/transcription products. Thus members of the cucurbit family (e.g., pumpkin and cucumber, Ruiz-Medrano, Development 126:4405-4419 (1999)), lupin, Ricinus communis (Sakuth et al., Planta 191:207-213 (1998)), and some trees species including Eucalyptus globulus (Pate et al., Oecologia 117:312-322 (1998)), Robinia and Tilia (Schobert et al., Planta 206:245-252 (1998)) are particularly useful in this regard. Phloem sap can be collected from the above plants by incision wounding, followed by bleeding, and can also be collected from most plant species by cutting the petiole/stem under a solution of EGTA.

[0244] In the process of identifying genes involved in the long-distance florigenic signaling pathway, it is useful to compare plants/plant systems that are induced to flower in different ways, for example, photoperiod-induced flowering, graft-induced flowering or flowering induced by other abiotic or biotic stimuli known to those skilled in the art. The term “abiotic stimulus” is used herein to refer to a non-living stimulus, e.g., light, photoperiod, pH, temperature, water, osmotic stress, and the like. The term “biotic stimulus” is used herein to refer to a living stimulus, e.g., pathogens, signaling molecules, factors, and others.

[0245] Exemplary plants for photoperiod-induced flowering include Sicyos angulatus and related species of Sicyoeae, e.g., Polakowskia spp. and Sechium spp., such as Sechium edule (choko) (Heywood, Flowering plants of the world, Oxford (1978)). These species are maintained in a non-flowering state under long day photoperiods and are induced to flower following a treatment of short day photoperiods (Takahashi et al., Plant Cell Physiol. 23:1-9 (1982)). The plant systems for identifying florigen candidates as described herein include Sicyos angulatus (Bur Cucumber), Cucurbita moschata (butternut), C. maxima (pumpkin), Cucumis sativus (cucumber), N. tabacum cv Maryland mammoth, N. tabacum cv Samsun, N. sylvestris, N. benthamiana, and heterografts of C. sativus/C. maxima, C. sativus (stock)/Sicyos angulatus (scion), N. tabacum cv Samsun (stock)/N. tabacum cv Maryland mammoth (scion), Cucumis sativus cv Straight 8 (stock)/Cucurbita moschata PI441726 (scion), and early and late flowering accessions of C. moschata (Cucurbita moschata PI212011 and PI441726, respectively).

[0246] We have characterized several different plant systems for use in studying flowering control genes. For example, heterografts of naturally occurring early and late flowering variants of C. moschata plants are used to identify and isolate florigen candidate genes. Cucumber heterografts (Friedlander et al., Plant Cell Physiol. 18:1343-1350 (1977)) or pumpkin/cucumber heterografts are used to test for the presence of a graft transmissible florigenic signal or florigenic suppressor. Heterografts comprised of an early-flowering rootstock and late-flowering scion are useful for detecting signals that induce flowering, whereas heterografts comprising a vegetative rootstock and early flowering scion can be used to detect suppressors of flowering. Following confirmation that a graft-transmissible signal is produced in a particular plant heterograft system, phloem mobile gene products that correlate with floral induction or suppression can be identified (e.g., mRNA, peptides, proteins and miRNA). Additional details of the plant systems are given in Examples 1 and 2 below.

C. Bioinformatic Selection of Candidate Genes:

(1) Construction of Phloem Sap Libraries

[0247] The phloem sap is the port of entry of components of long-distance systemic signaling. The companion cells supply all components of the sieve tube system, and control the transport of phloem-mobile molecules into the phloem. Insofar as the methods for separating phloem (CC and SE) from surrounding tissues are not yet available, the phloem-containing tissues (i.e., roots, stems, petioles, leaf veins, and vascular strands) and preferably, the phloem sap, can be used to prepare cDNA libraries. Our studies thus far have shown phloem sap to be an excellent starting material for the isolation of putative regulators of long-distance florigenic signaling.

[0248] Phloem sap libraries were constructed as described below in Example 3. The EST sequences were databased and assembled into consensus sequences using Stackpack™, version 1.2 (Electric Genetics Corporation, Cape Town, South Africa). Prior to assembly of consensi, the database EST sequences were curated to remove: 1) repetitive sequences at sequence read termini flanked by polyA or polyT of at least 20 basepairs; 2) polyA or polyT sequences longer than 20 basepairs (replaced by one A or T); and 3) those exact duplicate sequences that were found to disturb the assembly procedure. The masking file used in the assembly contained sequences known to disturb assembly, including commonly used vectors and various repeats, as well as selected plant ribosomal RNA sequences.

(2) In Silico Analysis of Differential Expression

[0249] The EST member status for consensi is used to develop an in silico expression profile for all databased consensus sequences. This provides the frequency for any consensus (gene) per 1000 EST runs. Knowledge of the tissue from which the consensus EST members were derived, e.g., phloem sap from flowering or non-flowering plants, provides the relative contribution of particular tissues to EST members for a given consensus sequence.

(3) Criteria for Selection of Flowering Control Candidate Genes for in Planta Analysis

[0250] Candidate flowering control genes are selected from cucurbit phloem sap and phloem tissue cDNA libraries for in planta analysis based on several criteria. Of particular interest, for example, are:
[0251] a. Consensi that show hits to Swissprot/Tremble or Arabidopsis sequences that are known or putative regulatory genes, e.g. transcription factors and chromatin remodelling genes, kinases involved in regulatory signaling, and so on.
[0252] b. Cucurbit consensi that meet the above criterion and also contain one or more InterPro domains that are found in regulatory genes, e.g., transcriptional regulators and genes involved in chromatin remodeling
[0253] c. Consensi from phloem sap libraries that encode known floral regulators and would be expected to induce flowering if expressed in companion cells or associated tissues of transgenic plants, e.g., known floral homeotic genes.
[0254] d. Consensi that are likely to represent phloem-sap derived genes. Normalized expression values, as described above in (2), “In silico analysis of differential expression”, are used to prioritize likely phloem sap derived consensi (genes). Here the ratio of values derived from phloem sap derived libraries (combined values for flowering and non-flowering) and solid tissue (e.g. vascular strips from stem tissue) are used to prioritize candidates.
[0255] e. Consensi (genes) that are conserved between species at the nucleotide level, e.g., consensi having EST members that are represented in more than one cucurbit species (e.g., Cucurbita moschata, Cucurbita maxima, Cucumis sativus, and Sicyos angulatus).
[0256] f. Consensi (genes) that are conserved between species at the protein level, e.g., consensi derived from phloem sap of multiple cucurbit species that show a top hit to the same Swissprot/Tremble gene ID or TAIR Arabidopsis peptide sequence.
[0257] g. Consensi showing a biased contribution of EST members from either flowering or non-flowering phloem sap. This is calculated from in silico data as described above in (2), “In silico analysis of differential expression”. Here the ratio of values derived from phloem sap of flowering plant derived libraries and phloem sap of non-flowering plant derived libraries are used to prioritize candidates. This is considered to be one of several indicia of differential gene expression in flowering and non-flowering plants (see below).

[0258] Consensi that satisfy more than one of the above criteria are judged to have an increased likelihood of being involved in phloem-mediated regulatory activities.

D. Other Analytical Approaches for Selection of Candidate Genes

(1) Real Time RT-PCR Analysis of Differential Expression

[0259] Real time PCR is used to evaluate the relative levels of candidate gene transcript accumulation in flowering and non-flowering tissue and provides a means of refining the candidate gene selections based on in silico expression analysis. cDNA templates for the assay are synthesized from total RNA extracted from tissue (leaves, apices or vascular strips from the stem) or phloem sap derived from flowering or non-flowering plants using random primers and Reverse Transcriptase Super Script III. Real time quantification is performed using the cDNA template with a specific set of oligonucleotide primers for each candidate. The primer pairs are designed based on the consensus coding sequence of each cucurbit candidate. The PCR amplification is monitored by fluorescence emitted by the SYBR Green dye included in the PCR mix. The SYBR Green dye emits an increased fluorescence when bound to double-stranded DNA. The fluorescence is measured at each cycle of amplification using the ABI PRISM® 7900HT Sequence Detection System.

[0260] The relative abundance of each target is calculated as follows. The Threshold Cycle (CT) for each candidate included in the reaction is measured as the fractional cycle number at which the fluorescence passes a fixed threshold. The delta CT value is then determined by subtracting the CT value of the endogenous control (e.g., PP1, WRKY or GAI) from the CT value of the candidate. The relative abundance of the candidate is then calculated by subtracting the delta CT value of the candidate in non-flowering tissue from the delta CT value of the same candidate in flowering tissue.

(2) Macroarray Analysis of Differential Expression

[0261] Expression profiling of flowering and non-flowering cucurbits is performed by macroarray analysis, as described below.

[0262] Plasmid DNA (10-100 ng) comprising cucurbit candidate genes is arrayed onto Hybond N+ membrane (Amersham), denatured and fixed by baking or UV cross-linking. Phloem and vascular tissue RNA is isolated from flowering and non-flowering plants, reverse-transcribed, and labeled. Probes with equal specific activity are hybridized to the plasmid DNA array overnight at 65° C. in a solution containing 0.5 M Na₂HPO₄, 1 mM EDTA, 1% BSA, and 7% SDS. Blots are washed twice for 10 min in 2×SSC, 0.1% SDS at 65° C. Signal is detected using a phosphorimager.

(3) Protein and Peptide Analysis

[0263] The phloem sap is a source of proteins, peptides, small RNA molecules and protein-small RNA complexes that may be involved in flowering control. The phloem sap also contains proteins that are involved in cell-to-cell trafficking of mRNA and small RNA molecules. The proteins and peptides can be extracted and separated by chromatographic and electrophoretic techniques, and their profiles compared in plants in flowering and non-flowering states to identify products specific to floral induction. Useful approaches for identifying and analyzing changes in phloem-mobile proteins and peptides during the floral transition in cucurbits include 2-D Fluorescence Difference Gel Electrophoresis (Ettan™ DIGE, Amersham Biosciences), high pressure liquid chromatography (HPLC), gel filtration chromatography (GFC) and mass fingerprinting and fragmentation analysis (see, e.g., Shevchenko et al., Proc. Natl. Acad. Sci. USA 93: 14440-14445 (1996); Washburn et al., Nature Biotech. 19: 242-247 (2001)).

[0264] The temporal appearance and spatial distribution of phloem-mobile proteins and RNA of interest can be followed in plant tissues during the floral transition using both histological and microinjection techniques (see General Methods below).

E. Small RNA (sRNA) Phloem Mobile Regulators of Flowering

[0265] Small RNA molecules are single stranded or double stranded noncoding RNA molecules generally in the range of 18-25 nt in length. They include microRNAs, which are single stranded and produced by the cleavage of short stem-loop precursors by Dicer-like enzymes, and small interfering RNAs (siRNAs), which are produced by the cleavage of long double-stranded RNA molecules.

[0266] The small RNAs in the phloem may play important roles in non-cell autonomous signaling events which occur between cells and over long distances in the plant, and are implicated in a broad spectrum of plant developmental, physiological and biochemical processes, e.g., flowering, coordination of plant growth and development, systemic resistance to pathogens, responses to environmental stresses, gene silencing related to viral defense, biomass distribution, regulation of carbon metabolism, control of plant size and developmental timing and patterning. Small RNA species produce epigenetic changes in gene expression patterns by processes as diverse as targeted degradation, chromatin methylation and arrest of translation.

[0267] Our analyses of phloem-mobile RNA populations of cucurbits demonstrated the presence of small RNA molecules in phloem sap and in vascular strands of cucurbits. These small RNA species were cloned (see Example 4), sequenced and databased, and their size distribution and complexity was analyzed. The authenticity of the phloem small RNAs was confirmed by comparisons with cucurbit genomic sequences.

(1) Selection Criteria for sRNA Candidates

[0268] The identification of candidate sRNAs as flowering control regulators is based in part upon bioinformatic criteria that are applied to the databased sRNA sequences to distinguish sRNA from contaminating fragments of other noncoding RNAs. MicroRNA sequences (miRNAs) are annotated according to the following guidelines proposed by Ambros et al. (RNA 9:277-279 (2003)):
[0269] (a) phylogenetic conservation of the miRNA sequence, determined bioinformatically;
[0270] (b) biogenesis criteria (identification of the putative precursor by prediction of a potential fold-back structure), also determined bioinformatically; and
[0271] (c) expression criteria (identification of sequence in a library of cDNA made from size-fractionated RNA; detection of a distinct ˜22 nt RNA transcript by hybridization to a size-fractionated RNA sample).

[0272] Small RNA ranging from 19-25 nt in length are subjected to FASTA analysis against Arabidopsis rRNA and tRNA. FASTA hits with up to 2 mismatches are discarded as probable structural RNA contamination. The remaining sequences and their reverse complements are subjected to FASTA analysis against Arabidopsis intergenic region sequences. All FASTA hits with up to 3 mismatches are annotated as putative regulatory sRNA candidates on the basis of phylogenetic conservation. Further FASTA analysis allowing for up to 3 mismatches is performed against rice, Brassica and Populus genome datasets to confirm conserved sRNA. Identified conserved sequences are further analyzed by an RNA-folding program, leading to identification of candidates with a potential fold-back precursor structure that contains the sRNA sequence within one arm of the hairpin.

[0273] sRNA candidates are then identified from the cucurbit sRNA database based on differential expression of sRNA across the floral transition, as determined by both in silico and transcriptional profiling of phloem sap sRNA by Northern/reverse Northern methods, carried out as described below.

[0274] sRNA candidates are also identified from small RNA libraries of other species, such as Arabidopsis. These candidates are then tested in plants for their effects on flowering time (see Example 5 below).

Northern Analysis

[0275] Low molecular weight RNA is extracted from phloem of vegetative and flowering plants as described in Example 4, resolved on denaturing 15% polyacrylamide gel, blotted onto Hybond XL membrane (Amersham) and UV cross-linked. DNA oligonucleotides complementary to sRNA sequences are labeled and hybridized to RNA blots overnight at 40-45° C. in a solution containing 0.5 M Na₂HPO₄, 1 mM EDTA, 1% BSA, and 7% SDS. Blots are washed twice for 10 min in 2×SSC, 0.1% SDS at 50-55° C. Sense DNA oligonucleotides are used as negative control.

Reverse Northern Analysis

[0276] DNA oligonucleotides (1-100 pmol) complementary to sRNA are arrayed onto Hybond N+ membrane (Amersham) and fixed by baking or UV cross-linking. Vegetative and flowering plant phloem sRNA fractions, isolated and recovered from the gel as described in Example 4 are labeled. Vegetative and flowering probes of equal specific activity are hybridized to oligo arrays to identify differentially expressed sRNAs. Array of sense DNA oligonucleotides is used as a control.

(2) Bioinformatics Identification of Small RNA Target Genes

[0277] FASTA analysis with conserved candidate small RNAs and reverse complement of conserved candidate small RNAs is performed against the following target datasets: Arabidopsis CDS, Arabidopsis 3′UTR, Arabidopsis 5′UTR, Rice CDS and plant consensi sets in SRS (Actinidia spp, Cucurbita spp, Eucalyptus spp, Festuca spp, Lolium spp, Malus domestica, Pinus radiata, Pinus taeda, Populus spp assembled ESTs, Sicyos angulatus and Vaccinium spp). Reverse complement hits with up to 3 mismatches are reported as putative targets. Targets conserved across taxonomic boundaries are confirmed using RNA ligase mediated 5′ RACE as described by Kasschau et al., Dev. Cell 4:205-217 (2003).

[0278] This approach is illustrated in the Table below for sequences identified herein as SEQ ID NO: 251-263 and 381.

TABLE 3
miRNA sources and sequence annotation

| | | Sequence | |
|---|---|---|---|
| SEQ ID NO. | Source | annotation | Target family |
| 251 | Flowering S. angulatus phloem sap | miR156 | Squamosa - promoter |
| | | | binding protein |
| 252 | Vegetative S. angulatus phloem sap | miR159 | MYB transcription |
| | | | factors |
| 253 | Flowering S. angulatus phloem sap | Similar to | MYB transcription |
| | | miR159 | factors |
| 254 | Vegetative C. moschata phloem sap | Similar to | MYB transcription |
| | | miR159 | factors |
| 255 | Vegetative S. angulatus phloem sap | miR319a | TCP genes |
| 256 | Vegetative S. angulatus phloem sap | Similar to | MYB transcription |
| | | miR159 | factors |
| 257 | Flowering C. sativus Beluga phloem | miR162 | Dicer |
| | sap | | |
| 258 | Flowering S. angulatus phloem sap | Similar to | Auxin response factors |
| | | miR167 | |
| 259 | Vegetative S. angulatus phloem sap | Similar to | Auxin response factors |
| | | miR167 | |
| 260 | Flowering S. angulatus phloem sap | Similar to | Auxin response factors |
| | | miR167 | |
| 261 | Flowering S. angulatus phloem sap | Similar to | Auxin response factors |
| | | miR167 | |
| 262 | Flowering long day C. moschata | Similar to | CCAAT binding |
| | phloem sap | miR169 | transcription factors |
| 263 | Vegetative S. angulatus phloem sap | 172b | APETALA2-like |
| | | | transcription factors |
| 381 | Arabidopsis thaliana seedling (4-5 | Similar to | At1g64100, unknown |
| | days old) | miR158 | protein |

Table legend:
miR319a: TTGGACTGAAGGGAGCTCCC (SEQ ID NO: 264)
Palatnik et al., Nature 425: 257-263, 2003;
miR172: TTGGACTGAAGGGAGCTCCC (SEQ ID NO: 265)
Chen, Science 303: 2022-2025, 2004; Published online Jul. 31, 2003;
miR156: TGACAGAAGAGAGTGAGCAC (SEQ ID NO: 266)
miR167: TGAAGCTGCCAGCATGATCTA (SEQ ID NO: 267)
Reinhart et al., Genes Dev. 16: 1616-1626, 2002. Erratum in: Genes Dev. 16: 2313, 2002; and Kasschau et al., Dev. Cell 4: 205-217, 2003;
miR159: TTTGGATTGAAGGGAGCTCTA (SEQ ID NO: 268)
miR169: CAGCCAAGGATGACTTGCCGA (SEQ ID NO: 269)
Reinhart et al., Genes Dev. 16: 1616-1626, 2002. Erratum in: Genes Dev. 16: 2313, 2002; and Rhoades et al., Cell 110: 513-520, 2002;
miR162: TCGATAAACCTCTGCATCCAG (SEQ ID NO: 270)
Reinhart et al., Genes Dev. 16: 1616-1626, 2002. Erratum in: Genes Dev. 16: 2313, 2002; and Xie et al., Curr. Biol. 13: 784-789, 2003;
miR158: TCCCAAATGTAGACAAAGCA (SEQ ID NO: 381)
Rhoades et al., Cell 110: 513-520, 2002.

(3) Use of Macroarrays to Identify Small RNA Targets

[0279] This method utilizes an array containing DNA of putative sRNA targets (eg transcription factors, chromatin remodelling genes) identified in phloem sap or tissue cDNA libraries. Plasmid_DNA (10-100 ng) is arrayed onto Hybond N+ membrane (Amersham), denatured and fixed by baking or UV cross-linking. The phloem sRNA fraction is isolated and recovered from the gel (Example 4) and is labeled. The labeled sRNA is hybridized to the plasmid DNA array overnight at 30° C. in a solution containing 0.5 M Na₂HPO₄, 1 mM EDTA, 1% BSA, and 7% SDS. Blots are washed twice for 10 min in 2×SSC, 0.1% SDS at 37° C. Higher stringency washes are used if required and signal is captured using a phosphorimager.

F. In Planta Candidate Gene Analysis

[0280] Once a candidate LDFSC is identified, the encoding polynucleotide sequence is analyzed for its effect on flowering by transforming a plant with a genetic construct comprising the isolated sequence operably linked to a promoter and terminator, and expressing the sequence in the plant. See Examples 6-8 below. The test plant may be the same as or different from the plant that normally expresses the sequence. For example, a late flowering cucurbit may be used to test candidate LDFSCs from other cucurbits of the same or different species. If transgenic expression of a candidate LDFSC produces flowering under non-inductive conditions, it is reasonable to infer that the candidate molecule is a florigen, or a component thereof. Alternatively, an early flowering cucurbit may be used to test candidate LDFSCs from other cucurbits of the same or different species. If transgenic expression of a candidate LDFSC suppresses or delays flowering under inductive conditions, it is reasonable to infer that the candidate molecule comprises a component of flowering control.

[0281] The inventors have developed methods for transforming cucumber plants (e.g., C. sativus cv Straight Eight). GUS staining of F0 primary cucumber transformants was performed to confirm expression of the transgene. The seed from the primary transgenics was harvested and germinated. Following germination, histochemical analysis of seedlings revealed meiotic transmission of the transgene with the expected Mendelian ratio of 3:1.

[0282] Candidate genes are selected for in planta analysis both from cucurbits and from Arabidopsis. Arabidopsis orthologs of cucurbit genes are identified as follows.

[0283] BLASTX is performed using the cucurbit candidate consensus nucleotide sequence (using default BLASTX parameters) to identify the Arabidopsis ortholog from the TAIR Arabidopsis peptide database (May 2003). TBLASTN (using default parameters) is then performed using the suspected Arabidopsis ortholog peptide sequence to determine if the top reciprocal hit is the original cucurbit consensus sequence. A phylogenetic tree is assembled (using CLUSTALX version 1.8 software, with 1000 bootstrap trials) for each consensus sequence, and the cucurbit candidate peptide sequence and the putative Arabidopsis ortholog peptide sequence(s) are compared in the resulting tree. The phylogenetic tree is used in conjunction with visual inspection of the BLASTX sequence alignments to select the best matching putative ortholog or corresponding gene among the Arabidopsis genes.

(1) Overexpression of Arabidopsis Candidate Genes in Phloem using a Companion Cell-Specific Promoter

[0284] The candidate cucurbit gene or Arabidopsis ortholog open reading frames (ATG to STOP codon) are amplified by the polymerase chain reaction from Arabidopsis cDNA or genomic DNA using gene specific primers with cloning sites (BamHI, ClaI, HindIII or SpeI). The amplified fragments are then restriction digested and cloned into a vector containing the Arabidopsis PP1 companion cell specific promoter and NOS terminator (An exemplary vector is shown in FIG. 49). Once the sequence is confirmed, the promoter-candidate gene-terminator cassette is cloned into the binary vector pART27 using Not1 sites.

[0285] Candidate binary constructs are transformed into Agrobacterium. Confirmed kanamycin resistant Agrobacterium are used to transform Arabidopsis thaliana Col. Plants by a floral dipping procedure. Transgenic T1 plants are selected based on kanamycin resistance and homozygous transgenic lines selected in the T2 generation. Homozygous lines are used to phenotype significant changes in flowering time under controlled long and short day light conditions.

(2) Promoter::GUS Mediated Analysis of Candidate Gene Expression Pattern in Arabidopsis

[0286] In order to provide information on the expression patterns of candidate genes in Arabidopsis, the corresponding promoter of the candidate gene (a 1.5 kb genomic region upstream of the ATG) is cloned and fused upstream of the GUS marker gene. The promoter::GUS construct is then transformed into Arabidopsis thaliana Col. plants and the GUS expression pattern determined in T2 homozygous plants at vegetative and flowering developmental stages. Correlative evidence supporting non-cell autonomous action of the candidate gene would include floral induction (or delay) and expression in the leaves but not the shoot apex.

(3) Analysis of Arabidopsis T-DNA Insertion Lines for Candidate Genes

[0287] To complement the candidate gene overexpression studies detailed above, downregulation in Arabidopsis is studied using SALK T-DNA insertion lines obtained from the NASC Center, Nottingham, UK. A T-DNA line is selected based on T-DNA insertion into the Arabidopsis candidate gene.

[0288] Segregating T3 seed lines obtained from the NASC seed stock center are then screened for significant changes in flowering time by germination of seed on Grodan rockwool blocks soaked in nutrient mix and pricking out of seedlings onto fresh blocks. Flowering time is compared to wild type and known flowering marker lines grown next to the candidate lines. Both candidate and marker lines are grown under controlled short and long day light conditions as detailed below in Example 1D.

(4) Analysis of Candidate Genes by Engineered Dominant Negative Forms and Analysis of Flowering Time in Arabidopsis Companion Cell Overexpression Transgenic Lines

[0289] Candidate transcription factors that demonstrate an alteration in flowering time following overexpression and/or downregulation in Arabidopsis or cucurbits will be engineered into dominant negative forms. In this instance, transcription factor candidates will be C-terminally translationally fused to the Arabidopsis thaliana EAR motif, a 12 amino acid repression domain (LDLDLELRLGFA) that results in dominant repression of downstream target genes of the modified candidate (Hiratsu et al., (2003) Plant J. 34: 733-739). This dominant-negative approach can be used to achieve down regulation of gene families. In this way, the function of a putative flowering control transcription factor can be blocked and its effect on flowering time observed in transgenic plants overexpressing the fusion gene with a companion cell specific promoter, as described above.

[0290] In other instances, inspection of candidate sequences will suggest ways of manipulating these sequences into dominant negative forms, e.g., changes in essential amino acids, removal of RNA binding domains, and so on. These modified sequences will be tested for dominant negative effects.

(5) Analysis of Candidate Genes by Temporal Expression in Arabidopsis Companion Cell Overexpression Transgenic Lines

[0291] In addition to constitutive overexpression of candidate genes in Arabidopsis using a companion cell-specific promoter, it is possible to achieve temporal expression of a candidate gene using a chemically inducible gene switch system, such as the ethanol inducible alc gene switch system which has been characterized in Arabidopsis (see Roslan et al., Plant J. 28:225-235 (2001)). Such a system would comprise an activation cassette consisting of a companion cell-specific promoter driving expression of an inducible activator transcription factor and a reporter cassette consisting of promoter binding elements of the activation transcription factor fused to a minimal promoter driving expression of the candidate gene. Both activation and reporter cassettes would be cloned on a binary plasmid to enable Agrobacterium mediated plant transformation.

[0292] Transgenic Arabidopsis plants containing the inducible system are exposed to a chemical inducer at a particular stage of development, which causes a conformational change in the structure of the companion cell-expressed activation transcription factor that allows it to bind to its promoter binding elements in the reporter cassette thus driving the expression of the candidate gene. In this way, temporal companion cell-specific expression of the candidate gene can be achieved. Such induced transgenic Arabidopsis lines are grown under controlled short and long day light conditions, and phenotyped for significant changes in the flowering response.

(6) Viral Vector Mediated in Planta Candidate Gene Analysis

[0293] In planta candidate gene analysis is performed, in part, utilizing a plant viral vector delivery system. The vector derived from Zucchini yellow mosaic potyvirus (ZYMV) is used to deliver and mediate expression of candidate genes in the phloem-associated cells of Sicyos angulatus or Cucurbita moschata PI441726 maintained under non-inductive conditions. The viral vector was originally developed by the lab of Shyi-Dong Yeh from the Department of Plant Pathology of the National Chung Hsing University in Taichung, Taiwan (Bot. Bull. Acad. Sin. 2002, 43:261).

[0294] The potyvirus group (including ZYMV) contain a single-stranded positive sense RNA molecule of ˜8-10 kb. The genome of the ZYMV is translated into a single polypeptide of 350 kDa which is subsequently cleaved by the viral protease into 10 proteins essential for the virus infectious cycle. To overexpress the candidate gene, the coding sequence of the candidate is introduced into the genome of the virus as a translational fusion bordered by the viral protease cleavage site. Two variants of ZYMV are used for overexpression of candidate genes. In the first variant, the site of the candidate gene insertion is located between proteins 9 and 10 (Nib and CP), while in the second variant, the insertion is between protein 1 and 2 (P1 and HC-Pro).

[0295] In both vectors, the site of insertion is followed by sequences encoding the cleavage site recognized by the Nia viral protease (protein 8). The presence of an additional protease recognition site upstream ensures that the inserted protein is released from the polyprotein albeit with SACGPTS N-terminal and GTDTVMLQ C-terminal amino acid extension by the Nia protease. During the infection process the expressed candidate sequence is released in the cytoplasm of the infected cell. The capacity of ZYMV to move cell to cell and systemically within the plant ensures release of the candidate protein in cells throughout the infection process. Using this viral vector delivery system, we have demonstrated that cucurbit CO and FT induce flowering when expressed in the Cucurbita moschata PI 441726 system (See FIG. 145, and Example 6 below). We anticipate that this viral vector delivery system with Sicyos angulatus and/or Cucurbita moschata PI 441726 maintained under non-inductive conditions will reveal additional candidates that induce flowering. Experiments are currently underway in our laboratory to ascertain whether SIPs such as those encoded by polynucleotide sequences identified herein as SEQ ID NO: 271-322 are active in florigenic signaling.

[0296] Other experiments in progress are designed to identify functional regions of the FT polypeptide that are involved in one or more aspects of floral control.

[0297] In these experiments, peptides of 3-27 amino acids are derived from the FT N-terminus and tested for their ability to induce flowering (FIG. 145). Parallel experiments will be performed to reveal genes that suppress or delay flowering when the plants are maintained under inductive conditions. The polynucleotide sequences encoding these peptides are given in SEQ ID NO: 403-480 (A. thaliana), SEQ ID NO: 559-636 (Cucurbita maxima), and SEQ ID NO: 715-792 (Festuca arundinacea). The sequences of the peptides are given in SEQ ID NO: 481-558 (A. thaliana), SEQ ID NO: 637-714 (Cucurbita maxima), and SEQ ID NO: 793-870 (Festuca arundinacea).

2. Methods of Modulating the Florigenic Signaling Pathway

[0298] In another of its aspects, the present invention provides methods for modulating the florigenic signaling pathway to modify the occurrence, timing and extent of flower development.

[0299] The phrase “modulating the florigenic signaling pathway” means altering one or more steps in the above-described florigenic signaling pathway to effect either positive or negative changes in flower induction. The one or more modulatable steps in the pathway include: the reception and transduction of a signal from a leaf sensor cell by a CC in the leaf; the process of rendering the signal transmissible; the controlled entry of the LDFCS into the phloem; the translocation of the LDFCS in the phloem (including regeneration and amplification steps); and the delivery of the signal to the target meristem tissue (including any transformations of the signal that may be required for egress or propagation of the signal from the terminal phloem).

A. Modulation of Endogenous Gene Transcription using Agonists or Antagonists

[0300] The transcription of genes, identified as described above, which are involved in the production or delivery of an LDFSC, can be modulated by an agonist or antagonist of a binding event between a signaling molecule and its cognate binding partner that initiates the florigenic signaling cascade in the CC cells. The agonist or antagonist acts at the binding step or downstream of it, for example at a site in the signal transduction pathway, to increase or decrease gene transcription. The modulatable binding event may occur anywhere in or on the cell. For example, the binding interaction may occur inside the cell or at its surface or beneath the cell surface, in the cytosol, in a subcellular membrane or organelle, for example the nucleus.

[0301] The binding molecule may act as a transcription factor for one or more genes in the florigenic signaling cascade. In this case, the agonist (or antagonist) may interact with the transcription factor and/or other endogenous transcription complex proteins, or with a polynucleotide regulatory sequence, to enhance (or inhibit) transcription. If transcription is normally repressed, the agonist may bind a repressor molecule or a cis-element of a regulatory region to relieve repression. Alternatively, the agonist (or antagonist) may be a polynucleotide sequence that is used as a decoy to bind (i.e., to titrate) a repressor (or transcription) factor.

[0302] The agonist or antagonist may be isolated from a natural source or produced by synthetic or recombinant techniques. Exemplary agonists/antagonists include proteins, peptides, RNAs, naturally-occurring or synthetic molecules/complexes and combinations thereof. Further modification is also contemplated, e.g., post-translational modification of a protein or modification of one or more components of a complex of any of the aforementioned constituents. Antibodies or their derivatives (e.g., single chain antibody fragment(s) [ScFv], anti-idiotypic antibodies) that directly or indirectly modify the activity of the LDFSC or LDFSC component(s) are also useful agonists and antagonists and can be expressed in plants if desired.

[0303] Small molecule agonists may be developed by: identifying binding partners for a signaling molecule (such as FT); independently validating the association between the signaling molecule and its binding partners; validating the involvement of the signaling molecule/binding partner pair in flowering; and, if any of the binding agents contain an ATP binding site, model the site(s) (for example, by crystallography or in silico) and target it for the design of small molecules.

[0304] Depending on the biochemical nature of the agonist or antagonist, the latter may be introduced into the plant by, for example, wick feeding directly into the vasculature, physical contact (e.g., rubbing) of agonist or antagonist in the presence or absence of compounds (e.g., surfactants) that facilitate penetration into plant tissues, use of an engineered RNA transporter (ERT) that is transported between cells by a defined protein machinery provided in trans to deliver a defined agonist or antagonist in the presence or absence of a virus, use of a modified ERT that encodes both the transporting proteins and the transported agonist or antagonist, grafting techniques (e.g., bark grafting) for diffusible agonists or antagonists, Agrobacterium tumefaciens or biolistic bombardment mediated transient expression resulting in the local production of an agonist or antagonist, use of viral vectors (e.g., based on tobamoviruses, potexviruses or tobraviruses) to deliver the agonist or antagonist, and the like.

B. Modulation by Introducing a Recombinant Gene that Encodes an LDFSC or LDFSC Component

[0305] A genetic construct comprising one or more polynucleotide sequences that encode a candidate LDFSC or LDFSC accessory component can be introduced into a plant to determine the effect of expressing the sequence on floral induction. Ectopic expression can be used for validating the involvement of an endogenous gene in the florigenic signaling pathway and for determining the interchangeability of a candidate LDFSC or LDFSC component(s) that is derived from one plant species in the florigenic cascade of a different plant species.

[0306] The present invention contemplates the use of sense constructs to upregulate gene expression (either directly or by co-suppression of repressor genes). Genetic constructs comprising partial or full-length sequences can also be used to downregulate or silence the expression of repressor genes that affect the competency to flower, or to reduce the expression of florigenic signaling genes. RNAi methods and antisense technology are well known to those skilled in the art and can be used to selectively reduce or eliminate gene expression. RNAi reduces or eliminates specific gene functions by targeting for degradation the transcription products of genes with dsRNA homologous to the introduced sequence (reviewed by Sharp, Genes Dev. 13: 139-41 (1999)). RNAi can be produced by introducing double-stranded or single stranded RNA into plant cells, or by transforming the plants with RNAi expression constructs. The use of VIGS that can controllably and efficiently reduce gene expression in a systemic manner provides an alternative means for modulating the extent and timing of flowering. RNA virus vectors have also been described in connection with PTGS. Representative examples of RNAi silencing methods can be found in the following patent applications and publications: PCT Applications WO 99/49029, WO 98/36083, WO 99/15682, WO 98/53083, WO 99/53050, WO 00/49035, WO 01/77350, WO 01/94603, WO 02/00894, WO 01/75164, and WO 01/68836; Waterhouse et al., Proc. Natl. Acad. Sci. USA 95: 13959-13964 (1998); Smith et al., Nature 407: 319-320 (2000), Ruiz et al., Plant Cell 10: 937-946 (1998).

[0307] The above-described constructs utilize promoters that are expressed in many cell types (e.g., CaMV, 35S, superubiquitin), or promoters that are tissue specific and/or inducible. In a preferred embodiment of the invention, CC-specific promoters are used (e.g., the promoters for AtSut1, AtSUC2 (Genbank accession X79702), rolC, C. melo GAS1 (Genbank accession AF249912), AtPP16K (Genbank accession ATT22E16), AtPP1 (Genbank accession AL161544, AtPP2 (Genbank accession AL161551), AtLEAFY (Genbank accession M91208), and others).

[0308] Examples of inducible promoters include, for example, ethanol (Caddick et al., Nature Biotech. 16:177-180 (1998)), copper (Mett et al., Proc. Natl. Acad. Sci. USA 90: 4567-4571 (1993)), ecdysone (Martinez et al., Plant J. 19:97-106 (1999)) and others. Many plant promoters are known that can be used for practicing this invention.

[0309] Stably transformed plants expressing an LDFSC or LDFSC component can be obtained using Agrobacterium tumefaciens or microprojectile bombardment transformation procedures. These and other plant transformation methods are disclosed in this application and are well known to plant biotechnologists.

C. Modulation of Flowering by use of a Covalently Modified LDFSC

[0310] A florigenic signal that is taken up by, or produced within, the CC may require covalent modification(s) for entry into the phloem, for delivery to meristematic target tissue, and/or for activity at the target site. For example, a florigenic inducer that is produced elsewhere and taken up by the CC may contain additional amino acid residues/sequences (i.e. signal motifs/sequences) that direct its retention in CC cells. The cleavage of such sequences may be required for release from sites within the CC for subsequent transport into the SE. Alternatively, for entry into the phloem, a florigenic inducer may require modification, for instance, post-translational modification such as phosphorylation, glycosylation, or cleavage of amino acids, or by removal or addition of nucleotides as a result of alternative splicing (see, e.g., Lopato et al., Genes Dev. 13:987-1001 (1999)).

[0311] The identification of relevant modifications is made by correlating data from phloem sap analysis with sequence databases (prepared as described above). For example, phloem mobile peptides that originate from propeptide precursors or CC retention signals that require removal prior to translocation of a protein into the sieve tube system are identified by correlating mass fingerprinting and fragment analysis of phloem-mobile peptides and proteins with database sequences. Comparisons between phloem-mobile gene products predicted from the vascular gene database and phloem-mobile gene products defined by direct analysis are expected to yield information about potential targeting sequences, motifs and CC retention signals. In addition, comparison of phloem mobile RNAs, peptides and proteins may uncover common cis-acting zip code sequences and phloem-targeting sequences. Post-translational modifications may be detected by selective enrichment of post-translationally modified proteins from crude extracts using affinity-based methods (e.g., lectins for glycosylated proteins, high-affinity antibodies for phosphotyrosinyl residues, Pandey et al., Proc. Natl. Acad. Sci. USA 97:179-184 (2000)) or biotin affinity labels for phosphoseryl/phosphothreonyl residues (see Oda et al., Nature Biotech. 79:379-382 (2001)) combined with mass fingerprinting and fragmentation analyses (See, e.g., Zhou et al., Nature Biotech. 79:375-378 (2001)).

[0312] Putative retention signals, motifs or signal sequences identified by the above procedures can be translationally fused to a reporter molecule to ascertain the effect of the modification (e.g., selective retention or gain of function). The resulting information is useful in the design of fusion genes for modulating flowering when introduced into a plant.

[0313] The effect of other posttranslational modifications on a florigenic signaling protein, such as phosphorylation, isoprenylation, glycosylation, conjugation to small molecules and others, may be investigated, for example, by targeting specific cellular enzymes/enzyme cascades that catalyze the modifications, by changing the availability of substrates or cofactors, or by altering the amino acid sequence of a florigenic signaling protein.

D. Modulation of Delivery of an LDFSC to the Target Meristematic Tissue

[0314] The spatial and temporal characteristics of flowering can be modulated by affecting one or more of the following processes involved in the delivery of an LDFSC to the target meristem: the entry of the LDFSC into the phloem; the translocation of the LDFSC from the point of entry to the point of delivery in the terminal phloem; and the delivery of the signal to the target tissue.

[0315] The entry of the LDFSC into the phloem can be modulated by changing one or more of the following: the molecular dimensions of the LDFSC; the plasmodesmal SEL; or the translocation machinery within the plasmodesmata (PD).

[0316] Conformational changes in a protein or ribonucleoprotein LDFSC may involve a specific chaperone or receptor molecule within the PD that recognizes, binds and unfolds the protein. See, e.g., Kragler et al., EMBO J. 19:2856-2868 (2000). The binding of the chaperone to the LDFSC or to a binding site within the PD may be altered by modifying the binding properties of the chaperone directly, by changing its structure, or indirectly with agonists or antagonists of binding. Methods involving the use of viral and plant movement proteins to mediate cell-to-cell transport can be used in the practice of the present invention. Such methods are described in International Patent Publications WO 97/06669 and WO 97/20470, the disclosures of which are incorporated by reference herein in their entirety.

[0317] Changes in the plasmodesmal SEL, e.g., dilation or constriction of the PD aperture, may be produced by changes in the organization or contractility of filamentous actin, actomyosin or centrin brought about, e.g., by changes in calcium levels or phosphorylation-dephosphorylation. (See e.g., Zambryski and Crawford, Ann. Rev. Cell Dev. Biol. 16:393-421 (2000)). Modulation of calcium release and sequestration by Ca++ binding proteins in PD, of cell wall protein kinases and/or phosphatases, the introduction of actin-disrupting or stabilizing agents and/or modifications in myosin or centrin may alter the movement of materials through the PD.

[0318] Vectorial translocation of macromolecules through the PD may be effected by molecular motors (e.g., microtubule-based kinesin motors or actin-based myosin motors) (see Vale and Milligan, Science 288:88-95 (2000); Mermall et al., Science 279:527-533 (1998)), filament- and tubule-based springs, and by polymerization-induced growth (Mahadevan and Matsudaira, Science 288:95-99 (2000)). Changes in actomyosin and actin organization described above are expected to affect translocation as well.

[0319] The egress of the LDFSC from the terminal phloem may require additional modifications. For example, the removal of retention signals or a change in the size or conformation of LDFSC may be required to allow movement of the LDFSC from the phloem into the target site. If the LDFSC moves via symplastic transport, the extent and/or rate of movement may be influenced by the number and/or structure of functionally active PD at the apex (Ormenese et al., Planta 211:370-375 (2000)). In addition, the delivery route may be dependent upon the presence of address signals on the LDFSC that can be recognized by the transporting channels. Alternatively, if the LDFSC is communicated by a relay mechanism, the relay may require regeneration of the original signal or its conversion to a different form that can be propagated to, and received and transduced by, target meristem cells. One or more of these processes may be susceptible to modification to modulate a flowering response.

[0320] In general, it is understood that modulators of the flowering response may be components of other pathways that use both local and systemic transport of signals, e.g., stress-activated responses, viral infection and immunity, etc. and that modulators may be interchangeable between different species of plants.

[0321] The ability to modulate the amount of an LDFSC produced in response to an external stimulus may also be useful, e.g., to determine the stability of an LDFSC, to determine the relationship between the amount of LDFSC produced and the rate of progression to flowering (see, e.g., Pouteau et al., Plant Physiol. 118:1191-1201 (1998)), and to identify cell types involved in the regeneration or amplification of LDFSC during systemic transport. Modulation may be effected by changing the duration of exposure of a plant to an external stimulus, or the total portion of the plant exposed to the stimulus (e.g., the number of induced leaves on the plant, Tooke and Battey, Plant Cell 12:1837-1848 (2000)).

[0322] The amount and position of flowers that form on a plant may be modulated by altering the responsiveness of axillary meristem to flower inducing signals, e.g., by interfering with repressors of flowering or by facilitating the transport of inducers to axillary meristems.

3. Methods of Screening for Modulators of the Florigenic Signaling Pathway

[0323] The present invention comprises various methods of screening for modulators of the florigenic signaling pathway. In the broadest aspect, these methods comprise the following steps: (a) exposing a plant (or a portion thereof) to a flowering stimulus; (b) contacting the plant (or portion thereof) with a candidate modulator; and (c) assessing the effect of the candidate modulator on florigenic signaling.

[0324] A “flowering stimulus” is any stimulus that is capable of inducing the florigenic signaling cascade, e.g., a photoperiod, a stress response, an artificial stimulus or a natural stimulus. A plant (or portion thereof) used for screening may be exposed to the signal directly or indirectly, e.g., via a heterograft that has been stimulated.

[0325] “Contacting” may be by any means, including direct surface application to an intact or cut portion of the plant, microinjection into a tissue or cell thereof, microbombardment, preferably under low pressure, etc.

[0326] Assessing the effect of the candidate modulator on florigenic signaling involves comparing a stimulus-dependent biochemical, functional, cytological or morphological change in the plant in the presence and absence of the candidate modulator. This change may involve, e.g., the production or inhibition of an inflorescence meristem or flower, a change in mitotic activity in shoot apical or lateral meristem cells, a change in symplastic transport of reporter-tagged macromolecules between cells in the meristem, the appearance of one or more unique transcripts or gene products in a portion of the plant involved in the generation, transmission or reception of a florigenic inducing signal (e.g., leaf cells or vasculature, stem vascular tissues, phloem sap, shoot apex), the activation of a genetic construct in a transformed plant cell, and other changes that are indicative of, or may correlate with florigenic signaling.

[0327] In vitro binding assays are also used according to the invention to identify agents that are capable of modulating the florigenic signaling pathway, e.g., by affecting the binding of an LDFSC to an LDFSC accessory component, an LDFSC to an LDFSC receptor in a target tissue or an LDFSC to a polynucleotide involved florigenic signaling.

[0328] The present invention provides methods for identifying an LDFSC and other components of the florigenic signaling pathway and for modulating floral development in a wide variety of plant species. These methods can be practiced by those of ordinary skill in the art, without undue experimentation, using currently available techniques that are routinely used in biotechnology and are referenced herein.

[0329] The identification of an LDFSC and other components of the florigenic signaling pathway is a prerequisite for the development of modified plants that display accelerated or delayed flowering responses compared with unmodified native plants. Such plant modifications have substantial practical uses, including for example: synchronization of floral induction in ornamental flowering plants and mechanical harvested crops such as peas to ensure that the produce obtained from all of the plants is uniform; suppression of florigenic signaling to delay or abolish flowering in instances where flowering lowers the value of the harvested crop (e.g., onion, celery, cabbage and other vegetables that bolt); selective induction of either male or female flowers when these flowers are normally derived from separate meristems; induction of male sterility by suppression of florigenic signaling that otherwise would lead to induction of male flowers or flower parts; acceleration of flowering time to lessen the time required to collect seed; acceleration of flowering time to enhance quality (e.g., in wine grapes); enhanced reproductive to vegetative ratio in evergreen fruit crops such as kiwifruit and avocados; use of a florigenic activator to synchronize bud burst, e.g., in New Zealand kiwifruit (Actinidia spp.) and table grapes, and for other applications where an agrichemical spray such as hydrogen cyanamide is presently used for this purpose.

[0330] Key floral integrators coordinate the initiation of flowering. We have shown that both the Arabidopsis Flowering locus T (FT) and the pumpkin ortholog of FT promoted flowering via the phloem. FT and other flowering control genes acting in the phloem will serve as targets for the rational design of “drugs”. Crystallographic data and molecular modeling will be used to design small molecule “drugs” to specifically interact with identified targets. The drugs are then synthesized and tested for their ability to interact with the target, using binding assays. Preferably, these drugs pass through the barriers of the leaf, e.g. the cuticle, when sprayed onto the leaf, and act systemically to modify and control the flowering response of the plant. The candidate drugs are then tested in plants for the ability to act systemically and modify flowering. The capacity of a spray to promote flowering will be tested using Arabidopsis maintained under non-inductive short days. Positive controls will include transgenic plants ectopically expressing FT or plants photoperiodically induced to flower. Quantifying the effect will be achieved by recording the number of rosette leaves formed at time of bolting.

[0331] The capacity of the spray to suppress flowering will be tested using Arabidopsis induced to flower by long day treatment. Controls will include plants maintained under short day photoperiods. Quantifying the effect will be achieved by recording the number of rosette leaves formed at time of bolting. Additional evaluation systems are envisaged, such as spray testing of lettuce plants maintained under inductive conditions (in this case >30° C.).

[0332] The following examples are presented solely to illustrate the practice of the invention, and not to limit the scope of the invention as claimed.

### EXAMPLE 1

### Plant Systems and Control of Floral Induction

[0333] This Example describes methods of controlling floral induction in plant systems used for identification and isolation of candidate flowering control genes from Cucurbit species and Arabidopsis.

A. Sicyos angulatus

[0334] Sicyos angulatus was grown in controlled environment chambers. Surface sterilized, imbibed, decoated seeds were germinated on a heated pad at 27° C. in vermiculite under constant light. Seedlings were transferred to Grodan rockwool blocks soaked in nutrient mix and maintained as follows: 1) 26° C.; 2) 50% humidity; and 3) an 8 hr light period with 16 hr dark period interspersed with red light night breaks of 5 min duration occurring every 60 min. Plants maintained in this manner remain vegetative without visible signs of floral bud development. When the plants were established and had grown ˜8-10 nodes (usually 10-14 days), the temperature was altered and maintained at 15° C. until time for tissue/phloem sap collection. Flowering was induced by removal of the night breaks while maintaining an 8 hr light period.

[0335] Stages of flowering were assessed phenotypically as described by Takahashi et al., Plant Cell Physiol. 23:1-9 (1982). Flower initiation, sexuality and development of flowers on each node of the main shoot were observed. Many floral buds produced in these experiments stopped development at various floral stages, and the final stages reached were recorded for each bud. Floral stages were determined by the longitudinal length for pistillate flowers and by the width for staminate flowers according to the following classification: 0, vegetative; 1, inflorescence primordium; 2, floral bud not exceeding 0.5 mm; 3, 0.6-1.5 mm; 4, 1.6-2.5 mm; 5, above 2.6 mm; 6, flower in anthesis.

B. Cucurbita moschata and Cucumis sativus

[0336] One hundred different accessions of Cucurbita moschata were obtained from a seed stock center. These were phenotyped in a greenhouse to identify early and late flowering accessions. Cucurbita moschata PI212011 was identified as an accession that flowered readily under both long days and short days. We selected this as an early flowering accession and seed stocks were bulked up in the greenhouse. Cucurbita moschata PI441726 was identified as late flowering, and as being an accession that can be maintained in a vegetative state under long days. There is a temperature component to floral induction with this accession, as long day repression appears to be relaxed as the temperature rises. Phloem sap obtained is used for comparing the phloem mobile population of molecules in flowering and non-flowering plants.

[0337] A commercial cultivar of Cucumis sativus may be employed in place of Cucurbita moschata. The rapidly growing cultivar Cucumis sativus cv Beluga was shown to exhibit a floral induction phenotype. The capacity to bleed copious amounts of phloem sap compared to Cucurbita moschata PI441726, makes this species an attractive system for examining the role played by phloem-mobile molecules in floral induction.

C. Heterograft

[0338] We have determined that Cucumis sativus cv Straight 8 is an excellent source of floral stimulus, by showing that:
[0339] (a) when a Sicyos angulatus scion was grafted onto Cucumis sativus cv Straight 8, all plants were induced to flower, in contrast to the self grafted Sicyos angulatus controls, where none of the plants was induced to flower; and
[0340] (b) when a Cucurbita moschata PI441726 scion was grafted onto Cucumis sativus cv Straight 8, all plants were induced to flower, in contrast to the self grafted Cucurbita moschata PI441726 controls, where none of the plants was induced to flower.

[0341] The Cucumis sativus cv Straight 8 (stock)/Cucurbita moschata PI441726 (scion) heterografted plants are maintained in a greenhouse. Cucumis sativus cv Straight 8 plants are germinated at 27° C. on a heated pad, then transferred to Grodan rockwool blocks and grown hydroponically. When the plants are 8-15 nodes in height, they are grafted with a Cucurbita moschata PI441726 scion using a reciprocally cut V-shaped wedge graft. The graft union is physically held using aluminum foil, and humidity is maintained by placing a plastic bag over the top. The bag is removed 7-10 days later when the graft shows signs of active growth. As the plants continue to grow, approximately 100% of grafted scion show signs of floral induction. Buds appear and eventually flowers go to full anthesis. To maximize transport of phloem into the scion, and hence floral induction, we remove the leaves and wrap the scion in black paper, thereby manipulating the source to sink ratio. Phloem sap is collected from the scion either by removing the scion above the graft union and bleeding from the cut end or nicking the scion stem while still attached and collecting the exuding droplets.

D. Arabidopsis

[0342] Floral induction can be induced and synchronized by first vernalizing plants and then growing plants under short day conditions prior to a single long day floral induction. These procedures have been described and refined by the group of George Bernier (Corbesier et al., Plant J. 9:947-952 (1996); Jacqmard et al., Ann. Bot. (Lond). 91:571-576 (2003); Tocquin et al., BMC Plant Biol. 3:2 (2003)). Plants are first vernalized for 42 days at 4° C. and then maintained under non-inductive short day conditions for 40-60 days. A single long day (e.g., a single intervening dark period is replaced with continuous light) is sufficient to induce synchronized flowering.

[0343] Candidate genes derived from a cucurbit phloem sap database (whether Arabidopsis orthologs or full length cucurbit candidate genes) are introduced into Arabidopsis Col. by a floral dip procedure under the control of a constitutive promoter (e.g., the superubuiquitin promoter), a companion cell-specific promoter (e.g., the Arabidopsis PP1 promoter), another tissue specific promoter or an inducible promoter. Selection of primary transformants is performed using seeds sown on plates or directly onto rockwool containing kanamycin. Alternatively, homozygous T2 or T3 seed is pre-screened and collected. Seedlings are vernalized for 1-6 weeks at 4° C. in the dark and then transferred to SD growing conditions (8 h light/16 h dark, 22° C., 60-65% humidity, and light levels of 50-200 μmol mM⁻²s⁻¹) for growth and synchronized induction. Floral induction is initiated using an uninterrupted long day light period.

[0344] The above procedure is used to determine the ability of flowering control candidate genes to induce Arabidopsis to flower under non-inductive SD conditions or to suppress or otherwise modify synchronized floral induction.

### EXAMPLE 2

### Identification of Phloem-Mobile Transcripts

[0345] This Example illustrates the use of C. sativus (scion)/C. maxima (rootstock) to identify phloem-mobile pumpkin sequences represented in libraries constructed from RNA of heterografted plants.

1. Grafting Protocols

[0346] The side-grafting technique of Tiedemann (Plant Physiol. 134:427-440 (1989)) was employed, with some modifications, to generate heterografts between scions cut from 4-week-old cucumber (Cucumis sativus cv. Straight Eight) plants (vegetative apex to the second expanded leaf) and stocks provided by equivalent-aged pumpkin plants. Each excised cucumber scion (approx. 5-10 cm in length) was carefully inserted into an incision made in a pumpkin (or cucumber for autografts) stem at a location 10 cm back from the vegetative apex. The graft site was fastened with tape or aluminium foil and sealed with a clear plastic bag. Grafted plants were grown in a greenhouse for 2-3 weeks. These conditions were optimized for the formation of functional graft unions. Plants were employed for phloem sap analysis 3-4 weeks after being grafted.

2. Phloem Sap Collection and RNA Extraction

[0347] Phloem sap was collected essentially as described by Ruiz-Medrano et al., (Development 126:4405-4419 (1999)) from Cucurbita maxima, Cucurbita moschata and Cucumis sativus plants and the grafted scions of Cucumis sativus. Stems or petioles were excised from the plant and blotted twice for several seconds onto sterile filter paper (#3 MM; Whatman, Maidstone, UK). Phloem sap exuded thereafter was collected using sterile micropipette tips (200 ml) and immediately mixed with an equal volume of 8 M guanidinium buffer (Logemann et al., Anal. Biochem. 163:16-20 (1987)) or phenol. Proteins in this sap were then extracted twice with a 25:24:1 phenol:chloroform:isoamyl alcohol mixture in the case of guanidinium buffer or chloroform in the case of phenol. The remaining RNA was then precipitated with 1.0 volume of isopropanol, 0.1 volumes of 3 M sodium acetate, pH 5.2 and 20 μg of a carrier such as linear acrylamide or glycogen, centrifuged at 4° C. for 45 minutes, washed with 70% ethanol, centrifuged at 4° C. for 30 minutes and then resuspended in sterilized deionized water.

[0348] Typically, RNA was extracted from 5-15 ml phloem sap of Cucurbita maxima, Cucurbita moschata, Cucumis sativus or heterografted plants. cDNAs were cloned from phloem sap RNA as described below in Examples 3 and 4. Cucurbita maxima (or Cucurbita moschata) and Cucumis sativus are taxonomically distinct species (Jobst et al., Mol. Phylogenetics Evolution 8:204-219 (1998)). This is reflected in sequence divergence and, as a consequence, comparative bioinformatic analysis of Cucurbita, Cucumis and heterograft phloem sap libraries provides a means of identifying phloem mobile pumpkin sequences represented in libraries constructed from RNA of heterografted plants.

### EXAMPLE 3

### Cloning ESTs from Cucurbit Phloem Sap poly (A)+ RNA

[0349] PolyA+ RNA was isolated from phloem sap using methods described by Ruiz-Medrano (Development 126: 4405-4419 (1999)). One methodology, APAC (Arbitrarily Primed Amplified _cDNA) was developed to clone ESTs from cucurbit phloem sap. The APAC method relies on PCR and is used with up to 40 cycles of amplification.

APAC Method

[0350] This method is illustrated in FIG. 49. In FIG. 49-1, poly (A)⁺ RNA is reverse transcribed into first-strand cDNA by using a T₂₀ anchor primer. First-strand cDNA is subjected to PCR employing 45 different pairs of arbitrary decamer primers R_{K} and R_{N} to generate 45 expression windows (FIG. 49-2). Six different primer sets each comprising 10 arbitrary decamer primers (Arbitrary 10-mer Primer Kits for Fingerprinting and Genetic Mapping; Sigma-Aldrich Genosys, Australia) were used to generate Cucurbit phloem-specific cDNA libraries. The sequences of primer set 1 are shown in Table 4 below (SEQ ID NO: 101-110) and as an illustration primer combinations used for second-strand cDNA synthesis using primer set 1 primers are shown below in Table 5. The resulting PCR products are double-stranded cDNA fragments with 3′-A overhangs ready for TOPO-TA™ (Invitrogen, Carlsbad, Calif.) cloning (FIG. 49-3).

TABLE 4

Sequences of the arbitrary decamer primers of
set 1 used for the APAC methodology

| | SET 1 | |
|---|---|---|
| SEQ ID NO: | Primers | Sequence |
| 101 | R50-1 | GTGCAATGAG |
| 102 | R50-2 | CAATGCGTCT |
| 103 | R50-3 | AGGATACGTG |
| 104 | R50-4 | TCCCTTTAGC |
| 105 | R50-5 | CGGATAACTG |
| 106 | R50-6 | AGGTTCTAGC |
| 107 | R50-7 | TCCGACGTAT |
| 108 | R50-8 | GGAAGACAAC |
| 109 | R50-9 | AGAAGCGATG |
| 110 | R50-10 | CCATTTACGC |

[0351] TABLE 5

All possible 45 primer combinations used for
second-strand cDNA synthesis in the APAC
methodology.

| | | |
|---|---|---|
| Mix No. | Primer 1 | Primer 2 |

| | | |
|---|---|---|
| A1 | R50-1 | R50-2 |
| A2 | R50-1 | R50-3 |
| A3 | R50-1 | R50-4 |
| A4 | R50-1 | R50-5 |
| A5 | R50-1 | R50-6 |
| A6 | R50-1 | R50-7 |
| A7 | R50-1 | R50-8 |
| A8 | R50-1 | R50-9 |
| A9 | R50-1 | R50-10 |
| A10 | R50-2 | R50-3 |
| A11 | R50-2 | R50-4 |
| A12 | R50-2 | R50-5 |
| A13 | R50-2 | R50-6 |
| A14 | R50-2 | R50-7 |
| A15 | R50-2 | R50-8 |
| A16 | R50-2 | R50-9 |
| A17 | R50-2 | R50-10 |
| A18 | R50-3 | R50-4 |
| A19 | R50-3 | R50-5 |
| A20 | R50-3 | R50-6 |
| A21 | R50-3 | R50-7 |
| A22 | R50-3 | R50-8 |
| A23 | R50-3 | R50-9 |
| A24 | R50-3 | R50-10 |
| A25 | R50-4 | R50-5 |
| A26 | R50-4 | R50-6 |
| A27 | R50-4 | R50-7 |
| A28 | R50-4 | R50-8 |
| A29 | R50-4 | R50-9 |
| A30 | R50-4 | R50-10 |
| A31 | R50-5 | R50-6 |
| A32 | R50-5 | R50-7 |
| A33 | R50-5 | R50-8 |
| A34 | R50-5 | R50-9 |
| A35 | R50-5 | R50-10 |
| A36 | R50-6 | R50-7 |
| A37 | R50-6 | R50-8 |
| A38 | R50-6 | R50-9 |
| A39 | R50-6 | R50-10 |
| A40 | R50-7 | R50-8 |
| A41 | R50-7 | R50-9 |
| A42 | R50-7 | R50-10 |
| A43 | R50-8 | R50-9 |
| A44 | R50-8 | R50-10 |
| A45 | R50-9 | R50-10 |

### EXAMPLE 4

### Construction of Small RNA Libraries

Small RNA Collection from Phloem Sap

[0352] Phloem sap was collected according to methods described by Ruiz-Medrano, Development 126:4405-4419 (1999) and Yoo et al., J Biol. Chem. 277:15325 (2002).

Purification of High and Low Molecular Weight RNA

[0353] High and low molecular weight fractions of RNA were prepared from total RNA using RNAqueous kit (Ambion, Austin Tex.). High molecular weight RNA was recovered from the glass fibre filter to which it binds in concentrated chaotropic salt solutions. Low molecular weight RNA was recovered from the flow-through and separated by electrophoresis through a denaturing 15% acrylamide gel. RNA in the 19-25 nt range (small RNA or sRNA) was excised from the gel and eluted with 0.5 M Na acetate, 10 mM EDTA at 4° C. overnight. The sRNA fraction was recovered by ethanol precipitation with 40 μg of glycogen and cloned.

Library Construction

Cloning protocol 1 (adapted from Elbashir et al., EMBO J. 20:6877-6888 (2001)).

[0354] The sRNA sample, prepared as described above, was treated with Shrimp Alkaline Phosphate (SAP, Roche Diagnostics, Indianapolis Ind.), extracted with phenol/chloroform, and precipitated with ethanol. The dephosphorylated sRNA sample was ligated to the 3′ RNA/DNA adapter (PO₄-UUUAACCGCATCCTTCTC-fluorescein), where UUU are ribonucleotides (SEQ ID NO: 111), in 50 mM Tris-HCl, pH 7.6, 10 mM MgCl₂, 1 mM ATP, 1 mM DTT, 5% PEG 8000, 0.1 mg/ml BSA, with 50 U T4 RNA ligase at room temperature for 2-4 hours or at 5° C. overnight. The ligation product was recovered from the gel as described above and was 5′ phosphorylated in 70 mM Tris-HCl pH 7.6, 10 mM MgCl₂, 100 mM KCl, 1 mM 2-mercaptoethanol, 1 mM ATP, with 10 U T4 polynucleotide kinase at 37° C. for 10 minutes. The phosphorylation reaction was stopped by phenol/chloroform extraction and RNA was recovered by ethanol precipitation. The 5′ DNA/RNA adapter (Cy5-TACTAATACGACTCAC-TAAA), where AAA are ribonucleotides (SEQ ID NO: 112), was then ligated to the phosphorylated ligation product as described above. A fluorescent 3′ end block on the 3′ adaptor and Cy5 on the 5′ adaptor were useful for ease of monitoring the products during synthesis. The new ligation product was extracted with phenol/chloroform, and precipitated with ethanol. This was followed by RT-PCR with 3′ and 5′ DNA oligonucleotides, respectively GACTAGCTGGAATTCAAGGATGCGGTTAAA (SEQ ID NO: 113) and CAGCCAACGGAATTCATACGACTCACTAAA (SEQ ID NO: 114) (bold, EcoRI site), using SuperScript One-Step RT-PCR with Platinum Taq (Invitrogen, Carlsbad, Calif.). Alternatively, reverse transcription was performed, as described below, with 3′ DNA oligonucleotide using SuperScriptII reverse transcriptase, followed by PCR with Advantage2 Polymerase (Clontech Laboratories, Palo Alto Calif.). The PCR product was recovered from the gel as described above, precipitated with ethanol and cloned into pCR4-TOPO (Invitrogen).

Cloning protocol 2 (based on Clontech SMART technology)

[0355] The miRNA sample was polyadenylated in 1 mM ATP, 20 mM Tris-HCl, pH 7.0, 50 mM KCl, 0.7 mM MnCl₂, 0.2 mM EDTA, 100 μg/ml BSA, 10% glycerol and 500 U poly(A) Polymerase at 30° C. for 20 min. Excess ATP was removed using a ProbeQuant column (Amersham Pharmacia, Uppsala, Sweden) and the polyadenylated RNA was precipitated with ethanol. This sample was then used for reverse transcription using an anchored 3′ (SMART) oligonucleotide, (ATTCGAATTCCGAGGCGGCCGACATG(T)₁₂VN) (SEQ ID NO: 115), where V=G, C or A and N=G, A or T; (bold, EcoRI site); a 5′(SMART) oligonucleotide, (AAGCAGTGGTATCAACGCAGAGTGAATTCTACGGCCGGG), (SEQ ID NO: 116), and PowerScript reverse transcriptase (Clontech). Reverse transcription was followed by PCR using 5′ and 3′ PCR primers, respectively (AAGCAGTGGTATCAACGCAGAGT) (SEQ ID NO: 117) and (ATTCGAATTCCGAGGCGGCCGACATG) (SEQ ID NO: 118) (bold, EcoRI site). The PCR product was purified with phenol/chloroform extraction, precipitated with ethanol, digested with EcoRI and concatamerized using T4 DNA ligase. Concatamers of a size>200 bp were cloned into pBluescriptSK.

### EXAMPLE 5

### In Planta Analysis of miRNA from Arabidopsis

[0356] The polynucleotide sequence of miRNA158 was amplified from A. thaliana genomic DNA using primers given in SEQ ID NO: 383 and 384 (see Table 6 below). The amplified fragment, given in SEQ ID NO: 382, which contained the mature miRNA (SEQ ID NO: 381) (Rhoades et al., Cell 110:513-520, 2002) was cloned into the plasmid pART27 under control of a constitutive promoter (SEQ ID NO: 2 from U.S. Pat. No. 6,380,459). The construct was transformed using standard Agrobacterium-mediated techniques into A. thaliana Columbia and the plants were maintained under non-inductive short day conditions (8 hours light).

[0357] Five control sets of plants were transformed with DNA derived from five separate regions of A. thaliana Columbia genomic DNA. For each of these control sets, a fragment of A thaliana Columbia genomic DNA was amplified using the primer pairs given in SEQ ID NO: 387 and 388; 390 and 391; 393 and 394; 397 and 398; 401 and 402, respectively. The primers were derived from the miRNA sequences listed in the Table below, and the sequences of the amplified miRNA precursors are given in SEQ ID NO: 386, 389, 392, 396 and 400 respectively. The sequences of the respective mature miRNAs are given in SEQ ID NO: 385, 267, 268, 398 and 399. Each amplified fragment was cloned into pART27 under the control of a constitutive promoter (SEQ ID NO: 2 from U.S. Pat. No. 6,380,459) and transformed into A. thaliana Columbia. These control plants were similarly maintained under non-inductive short day conditions (8 hours light).

[0358] At 91 dps, 23 test plants were analyzed for development of flowers. Of the plants analyzed, one did not flower, six plants had bolts of less than 2 cm, and eight had bolts of less than 5 cm. Control plants from each of the five control plant groups (20-24 plants per control group) were all flowering at 91 dps with bolts longer than 10 cm (FIG. 149). These results demonstrate that the ectopic expression of the miR158 precursor retarded flowering and therefore acts on a target that promotes flowering.

TABLE 6
Primers used to amplify miRNA controls

| | SEQ ID NO: | SEQ ID NO: | Length of | SEQ ID NO: |
|---|---|---|---|---|
| A. thaliana | Forward | Reverse | amplified | miRNA |
| miRNA | primer | primer | fragment (bp) | precursor |
| miR158 | 383 | 384 | 110 | 382 |
| miR171 | 387 | 388 | 175 | 386 |
| miR167a | 390 | 391 | 168 | 389 |
| miR159 | 393 | 394 | 340 | 392 |
| mi39 | 397 | 398 | 1,865 | 396 |
| mi2 | 401 | 402 | 2,934 | 400 |

[0359] References: mi39 and mi2: Llave et al., Plant Cell 14:1605-1619, 2002; Llave et al., Science 297:2053-2056, 2002. 1l 10.1084c2

### EXAMPLE 6

### Analysis of the Effect of A. thaliana FT on Flowering

[0360] To test the effect of FT on induction of flowering, the coding sequence of A. thaliana FT (AtFT; given in SEQ ID NO: 198) was cloned into the ZYMV vector using standard cloning techniques. Three independent experiments were performed. In each experiment, four to six Cucurbita moschata PI441726 plants were inoculated with the ZYMV/AtFT construct and maintained under non-inductive conditions. An empty ZYMV vector was used as control. Results from these experiments showed that experimental plants containing the ZYMV/AtFT construct formed floral buds and flowered within 25-35 days (FIG. 145B). No flowering was observed in the control plants under these conditions (FIG. 145A).

[0361] Similar results were obtained when Cucurbita moschata PI441726 plants were inoculated at different ages with the ZYMV/AtFT (FIG. 146A) or ZYMV/AtCO (FIG. 146B). No flowering was observed in the control plants under these conditions (FIG. 146C). These results showed that AtFT and AtCO promoted flowering in Cucurbita moschata PI441726 plants maintained under a non-inductive photoperiod.

[0362] In further studies, the ZYMV viral vector expression system was used to examine the kinetics of AtFT-mediated floral induction using Cucurbita moschata PI441726 plants maintained either under inductive or non-inductive conditions. Differences were observed in the pattern of appearance of floral nodes between plants induced to flower following inoculation with ZYMV/AtFT and plants induced to flower by an inductive photoperiod. To address this issue in more detail, the kinetics of ZYMV-AtFT mediated induction of flowering were examined. The results of these studies are shown in FIGS. 150A and B.

[0363] Plants were maintained under either non-inductive long day (LD; 8 hours light and 16 hours dark) conditions (FIG. 150A) or inductive short day (SD; 8 hours light and 16 hours dark interrupted by 5 min of lights every hour) conditions (FIG. 150B) and were either inoculated with ZYMV/AtFT or the control ZYMV/GFP, or were not inoculated. Bud formation and floral initiation were scored at 21, 28 and 40 days post inoculation (dpi). Under both inductive and non-inductive conditions ZYMV/AtFT induced early bud formation and floral initiation. Bud formation was first observed 21 dpi and occurred from the 4th and all subsequent nodes. Once again, uninoculated plants and control viral inoculations using ZYMV/GFP did not induce bud formation or floral initiation under non-inductive LD conditions. As expected, both uninoculated and control ZYMV/GFP inoculated plants were induced to flower under inductive SD conditions albeit one week later and 4-6 nodes higher on the plant than ZYMV/AtFT inoculated plants. Finally, the percentage of plants exhibiting bud formation and floral initiation at each node was much higher with ZYMV/AtFT inoculated plants, under both conditions, than with plants induced to flower by photoperiod indicating a significantly elevated level of floral induction. These results thus confirmed our initial observations that ZYMV/AtFT mediated bud formation occurred earlier and at nodes lower on the plant than with plants induced to flower by inductive SD photoperiods.

### EXAMPLE 7

### Analysis of the Effect of Two Cucurbit DNA Binding Proteins on Floral Induction

[0364] To test the effect of two DNA-binding proteins isolated from cucurbit phloem libraries on induction of flowering, the coding sequences given in SEQ ID NO: 377 and 378 were cloned into the ZYMV vector using standard cloning techniques. A description of the genes is given in Table 1. The ZYMV vector was used to express these genes in six Cucurbita moschata PI441726 plants that were maintained under non-inductive conditions. An empty ZYMV vector was used as control. Up to 50% of experimental plants flowered within 45 days of inoculation with ZYMV expressing either of the DNA binding proteins (SEQ ID NO: 377 or 378). No flowering was observed in the control plants under these conditions.

### EXAMPLE 8

### Expression of C. maxima FT Under Control of a Companion Cell-Specific Promoter, Suc2

[0365] The polynucleotide encoding an FT ortholog from Cucurbita maxima (CmFTL1; given in SEQ ID NO: 132) was cloned into the plant transformation vector pART27 under control of Suc2, a companion cell-specific promoter (Imlau et al., Plant Cell 11:209-322, 1999). This construct was transformed into 35 A. thaliana plants using standard Agrobacterium transformation techniques. Sixteen control plants were transformed with an empty vector under control of 35S promoter without a reporter gene. An additional set of twenty control plants were transformed with the companion cell specific promoter PP1 (Clark et al., Plant J. 12:49-61, 1997) with a GUS reporter. All plants were maintained under non-inductive short day conditions of 8 hours light. Companion cell-mediated expression of FT was analyzed 34 days post sowing (dps) and flowering was observed in 25 of the 35 experimental plants. Flowering was observed in all 35 plants on 43 dps. No flowering was observed for the control plants on 34 or 43 dps. These results demonstrate the role played by FT in promotion of flowering by acting in the plant vasculature and are consistent with signalling at a distance and a role for FT as a component of florigen.

### EXAMPLE 9

### The ZYMV Infection Pathway is Consistent with FT Acting Indirectly to Signal Floral Induction

[0366] ZYMV/AtFT mediated floral induction is either the result of cell autonomous activation of floral induction in the meristem, or, more likely, the activation of non-cell autonomous signalling leading to floral initiation in the meristem. Cucurbita moschata is a rapidly growing indeterminate vine with meristematic tissue associated with the main stem and at each node associated leaf, tendril, lateral bud and floral initials. We therefore sought to define the ZYMV infection pathway and the pattern of accumulation relative to meristematic tissues that would ultimately give rise to floral buds.

[0367] The infection pathway was initially defined by monitoring fluorescence associated with expression of the GFP reporter of ZYMV/GFP in infected tissues of C. moschata PI441726 plants. The pattern of fluorescence was determined in hand cut sections of the stem internode, leaf petiole and leaf blade at 35-40 dpi. Sections of plant material were prepared by hand with a razor blade. Unfixed specimens were mounted in water and GFP fluorescence was monitored under a Leica MZ FLIII stereomicroscope (Leica Microsystems AG, Heerbrugg, Switzerland), using a 480 nm excitation filer and 510 nm emition filter. Images were captured using a Leica DC300F camera. Fluorescence observed in stem internodes associated with the vasculature was consistent with long distance spread via the vasculature and subsequent replication. Fluorescence was easily detectable in vascular strands in all internodes, leaf petioles and blades except in the upper dissected nodes. Fluorescence was never detected in the lateral meristems of infected plants. This pattern of accumulation suggested that infection was excluded from the most rapidly growing tissues and meristem.

[0368] We next employed immunohistochemical detection of ZYMV coat protein (CP) in paraffin embedded sections to determine the spatial distribution of ZYMV in meristematic tissues. Fresh plant material was fixed in FAA (3.7% formaldehyde, 5% acetic acid, 50% ethanol) overnight at 4° C. Fixed tissues were dehydrated through an ethanol series and Neo-Clear (Merck, Darmstadt, Germany), and embedded in paraffin (Cox et al., Dev. Biol. 101:485-502, 1984). Sections (10 μm) were cut and mounted on electrostatically charged Superfrost Plus slides (BDH). Slides were used immediately or stored at −20° C.

[0369] For immunohistochemistry, sections were deparaffinized in Neo-Clear (2×10 min), rehydrated through an ethanol series and distilled water, and placed in 0.5% H₂O₂ in methanol for 10 min to block endogenous peroxidase activity. Slides were then pretreated in boiling 1 mM EDTA, pH 7.5 for 5-15 min and allowed to cool to room temperature. Slides were washed in distilled water for 5 min, followed by TBST (0.01% Tween 20 in TBS, pH 7.5) for 5 min. Sections were incubated with blocking reagent (0.1% BSA in TBST) for at least 10 min, the excess blocking reagent was removed, sections were covered with anti-ZYMV antibody (Agdia, Elkhart, Ind.) diluted 1:100 in blocking reagent and left in a humid chamber overnight.

[0370] Slides were then washed in TBST (2×5 min) and sections covered with the secondary antibody (anti-rabbit IgG, Sigma) diluted in blocking reagent 1:300. After incubation for 1 hour, slides were washed in TBST (2×5 min), placed in a humid chamber and sections were covered with DAB substrate (Roche) and incubated until desired staining has been achieved (usually 5-15 min). Slides were rinsed with distilled water, mounted and photographed.

[0371] Initial studies were performed to confirm, by immunohistochemical detection, the accumulation of CP associated with ZYMV/AtFT and ZYMV/GFP infection in leaf tissue. In contrast to control sections, CP was easily detectable in leaf blade sections derived from ZYMV/GFP and ZYMV/AtFT. We next examined longitudinal sections derived from the growing tip of ZYMV/GFP and ZYMV/AtFT infected plants. CP could not be detected in meristematic tissues derived from the main stem of a ZYMV/GFP or ZYMV/AtFT infected plant. Similar results were obtained following examination of the growing tip of a rapidly growing lateral derived from a ZYMV/GFP infected plant. These results confirmed our hypothesis that ZYMV/AtFT and ZYMV/GFP were excluded from meristematic tissues. Thus ZYMV/AtFT infection activates non-cell autonomous signaling leading to floral initiation in the meristem. As the FT sequence is present only in the ZYMV infectious RNA, its absence from the meristem implicates FT protein as the florigenic signaling agent.

### EXAMPLE 10

### Heterograft Experiments Confirm Phloem Delivery of Florigenic Signal

[0372] The nature of florigen as a phloem-mobile signal has previously been established using grafting experiments performed with florally-induced stocks and non-induced scions (Chailakhyan, Dokl. Akad. Nauk SSSR. 16:227-230, 1937; Lang, Proc. Natl. Acad. Sci. USA 74:2412-2416, 1977; Zeevaart, Annu. Rev. Plant Physiol. Plant Mol. Biol. 27:321-348, 1976). As C. maxima (a day-neutral species) flowers under LD conditions, whereas C. moschata PI441726 remains vegetative under these same growth conditions, heterograft experiments were performed using these two plants. As illustrated in Table 7, C. moschata PI441726 scions grafted onto C. moschata PI441726 stocks remained vegetative when grown under LD conditions. In contrast, C. moschata PI441726 scions grafted onto flowering C. maxima stocks were all induced to produce floral buds. These results indicate that the phloem sap of flowering C. maxima carries a compatible florigenic signal that mediates the vegetative-to-floral transition in C. moschata PI441726.

TABLE 7
Graft Transmission of Florigenic Signal from Cucurbita maxima Induces
Flowering in Cucurbita moschata PI441726 Scions

| Stock: Scion¹ | C. moschata PI441726: C. moschata PI441726 | | | | | | | | | |
|---|---|---|---|---|---|---|---|---|---|---|
| Node² | 1 | 2 | 3 | 4 | 5 | 6 | 7 | 8 | 9 | 10 |
| Floral Buds³ | 0 (6) | 0 (6) | 0 (6) | 1 (6) | 1 (6) | 1 (6) | 1 (6) | 0 (6) | 0 (6) | 0 (6) |

| Stock: Scion | C. maxima: C. moschata PI441726 | | | | | | | | | |
|---|---|---|---|---|---|---|---|---|---|---|
| Node | 1 | 2 | 3 | 4 | 5 | 6 | 7 | 8 | 9 | 10 |
| Floral Buds | 1 (6) | 2 (6) | 2 (6) | 3 (6) | 6 (6) | 6 (6) | 6 (6) | 6 (6) | 5 (6) | 5 (6) |

¹All grafted plants (6 per treatment) were grown under non-inducing LD conditions.
²Nodes 1 and 2 were present at time of grafting; nodes 3-10 developed post grafting.
³Floral buds/flowers were scored as a function of nodal position using the same criteria used for FIG. 150.

### EXAMPLE 11

### FT mRNA is Absent from Phloem Sap of Florally-Induced Plants

[0373] To further investigate the role of FT mRNA and/or FT protein as a component of the florigenic long-distance signaling system, the relationship between expression of the C. maxima FT orthologues and their capacity to enter the phloem translocation stream was examined.

[0374] For these experiments, LD-grown non-flowering (4-week-old) and flowering (6- to 12-week-old) C. maxima plants were used to obtain mRNA from stem vascular tissue. Real time RT-PCR analysis was employed and, in these experiments, CmFTL1 (SEQ ID NO: 132) and CmFTL2 (SEQ ID NO: 871) mRNA levels were normalized to CmPP16, as this mRNA species was earlier shown to be expressed in companion cells prior to its entry into the sieve elements for long-distance translocation (Xoconostle-Cázares et al., Science 283:94-98, 1999; Ruiz-Medrano et al., Development 126:4405-4419, 1999; Haywood et al., Plant J. 42:49-68, 2005). As shown in FIG. 151, the levels of CmFTL1 and CmFTL2 mRNA were low in 4-week-old plants. Under the growth conditions employed for our studies, C. maxima plants produced their first floral buds approx. 5 weeks after germination. Consistent with this observation, the levels of CmFTL1 and CmFTL2 mRNA increase significantly in 6- to 8-week-old stem vascular tissue. Based on these findings, all subsequent analyses were performed on 6-week-old LD-grown plants.

[0375] A time course for CmFTL1 and CmFTL2 expression was next established in order to ascertain the appropriate period to collect phloem sap for RNA analysis. Vascular tissues were collected over a 24 h period and real-time RT-PCR performed. In contrast to LD-grown Arabidopsis, where the levels of FT mRNA undergo a considerable increase upon the onset of darkness (Suarez-Lopez et al., Nature 410:1116-1120, 2001; Searle and Coupland, EMBO Journal 23:1217-1222, 2004), neither CmFTL1 nor CmFTL2 transcript levels exhibited marked peaks towards the end of the light period (FIG. 152A). Based on these findings, four time points were selected for the collection of phloem sap to be used for RNA and protein analyses.

[0376] RNA analysis of the phloem sap revealed that CmFTL1 and CmFTL2 transcripts, if present at all, were there at extremely low levels. As shown in FIG. 152B, the level of CmrbcS, a contaminant in the phloem sap, was approximately 104 fold lower than CmPP16 mRNA. Interestingly, CmFTL1 and CmFTL2 transcripts were at least 10⁵ fold lower than CmPP16 mRNA. As similar results were obtained from three replicate experiments, it is unlikely that CmFTL1 and CmFTL2 mRNA are bona fide components of the phloem long-distance florigenic signal.

### EXAMPLE 12

### CmFTL1 and CmFTL2 are Present in Phloem Sap of Florally-Induced Plants

[0377] To test for the presence of CmFTL1 and CmFTL2 in the vascular tissues and phloem sap of flowering C. maxima plants, proteins were extracted and then separated by fast protein liquid chromatography (FPLC) methods. Conceptual translations for CmFTL1 and CmFTL2 predicted positively charged proteins. Consequently, proteins were dialyzed, clarified by centrifugation and loaded onto a HiTrap SP cation-exchange column, connected to an Amersham Biosciences FPLC system; proteins were eluted with a linear NaCl gradient. Aliquots of each elution fraction (E1-E11) were separated by SDS-PAGE. FIGS. 153A and 153C illustrate the profiles of the FPLC-fractionated vascular tissue and phloem sap proteins, respectively.

[0378] In the absence of an appropriate FT antibody, a combination of LC-MS/MS was utilized to interrogate the FPLC-fractionated proteins for the presence of CmFTL1 and/or CmFTL2. To this end, vascular tissue and phloem sap fractions were separated on SDS PAGE gels, the 20 kDa regions excised, and the proteins then trypsin-digested, in-gel, for LC-MS/MS analysis. The screen established that, for both vascular tissue and phloem sap, CmFTL1 and CmFTL2 were located predominantly in fractions E9 and E5, respectively (FIGS. 153A and 153C). FIG. 154 presents spectral data for the most abundant tryptic peptides for CmFTL1 and CmFTL2.

[0379] To gain insight into the relative abundance of CmFTL1 and CmFTL2 in both vascular tissue and phloem sap, a second experiment was performed in which the E4-E10 fractions were pooled for the respective samples (FIGS. 153B and 8D). After in-gel processing of the excised 20 kDa bands, LC-MS/MS data were obtained. The spectral complexity recorded from these samples prevented us from obtaining reliable quantitative information on the abundance of CmFTL1 and CmFTL2. This situation was resolved using the following mass spectrometry method. A full survey scan and tandem MS spectra of the two most abundant ions in the scan were first acquired. Next, single ion monitoring (SIM) and tandem MS analysis were executed for m/z 597.3 (VIGDVVDSFSR, SEQ ID NO: 873, from CmFTL1 and VIGDVIDSFTK, SEQ ID NO: 874, from CmFTL2) and m/z 480.3 (VEIGGTDLR, SEQ ID NO: 875, common to both CmFTL1 and CmFTL2), regardless of their presence in the survey scan. The m/z 480.3 data were collected as an independent confirmation for the presence of CmFTL1 and/or CmFTL2. Finally, as the fragment ion m/z981 is characteristic for the SR and TK peptides (FIG. 154), after data acquisition, a fragment ion chromatogram was manually constructed for m/z 981 from all the tandem MS spectra of m/z 597.

[0380] Representative experimental results, obtained using this protocol on vascular tissue and phloem sap proteins, are illustrated in FIG. 155 and FIG. 156, respectively. Even though no clear SR and TK peptide chromatographic peaks could be identified in either the total ion chromatograms (FIG. 155A and FIG. 156A) or full mass spectrum survey scans (FIGS. 155D and 155G; FIGS. 156D and 156G), appropriate peaks could be clearly separated in single ion chromatograms (FIG. 155B and FIG. 156B) and isotopically resolved mass spectra of m/z597 (FIGS. 155E and 155H; FIGS. 156E and 156H). The final step in signal resolution was achieved by reconstruction of fragment ion chromatograms of m/z981 from all the tandem MS spectra of m/z 597. As illustrated in FIG. 155C and FIG. 156C, two distinct peaks corresponding to the SR and TK peptides were resolved. The identity of the SR and TK peptides were then determined using the tandem MS spectra corresponding to the particular peak (FIGS. 155F and 155I; FIGS. 156F and 156I).

[0381] Analysis of the SR and TK fragment trace ion chromatographic peak intensities yielded a relative abundance ratio of 1:2.3 for the vascular tissue and 1:3.5 for the phloem sap. Considering the similarity in SR and TK peptide sequences (FIG. 154) and the physico-chemical properties of the amino acid residues, the ionization efficiencies of the two peptide fragments should be equivalent. In this case, CmFLT2 appears to be two to four times more abundant than CmFLT1. These protein levels are consistent with real-time RT-PCR studies where CmFTL2 transcripts were always found to be more abundant than CmFTL1 mRNA.

### General Methods

[0382] Plant material is grown in controlled environment chambers as described by Xoconostle-Cazares, Plant J. 24:1-16 (2000). Alternatively plant material is grown in a greenhouse under the following conditions: a minimum of 22° C. (night) and 22-28° C. (day); supplemental lighting (daylength is approximately 10 h/day in mid-winter and approximately 15 h/day in mid summer) to extend daylength to 18 hrs, ambient humidity (normally 50-100% in Auckland, New Zealand), automatic watering and nutrient addition (an equal dose of solution A [calcium nitrate, 85 kg; ammonium nitrate, 7.8 kg; potassium nitrate, 9.6 kg; iron chelate, 0.675 kg; per 1000 l] and solution B [potassium nitrate, 56.2 kg; monopotassium phosphate, 20.4 kg; magnesium sulfate, 30.8 kg; manganese sulfate, 0.17 kg; zinc sulfate, 0.145 kg; borax, 0.240 kg; copper sulfate 0.019 kg; sodium molybdate, 0.012 kg; per 1000 l] were provided to plants such that the conductivity ranged between 23-30 and pH 5.5-6.5 when delivered to the plant pot).

Analysis of Proteins and Peptides

[0383] Polyacrylamide gel electrophoresis (1D and 2D) is performed using standard procedures as described in Sambrook et al., Molecular cloning: a laboratory manual. 2nd ed. Cold Spring Harbor Laboratory, Cold Spring Harbor, N.Y., 1989, and Matsudaira et al., A Practical Guide to Protein and Peptide Purification for Microsequencing, Academic Press, 1989).

[0384] Mass finger printing and fragment analysis is performed by LC-MS/MS. A general review of mass spectrometry techniques in protein identification can be found in Roepstorff, Curr. Op. Biotech. 8:6-13 (1997). Prior to mass spectroscopy, samples of phloem sap proteins and peptides are partially purified by chromatography to remove ions and non-protein contaminants.

Interpro Analysis

[0385] The InterPro motif database is available on the internet. The software InterProScan Release v3.1 was used to scan the predicted proteins from the cucurbit Stackpack assembled consensus DNA sequences. The InterProScan optional parameters used in running the software were as follows:

[0386] Interproscan.pl:

[0387] +ipr +go +scr

[0388] The Database used was InterPro as of 3 Oct. 2002, distributed together with the InterProScan vs 3.1, and the following component databases were included in the motif searches: PFAM, PRINTS, PRODOM, PROSITE, SMART and TIGRFAM.

Isolation, Cloning and Sequencing of RNA from Phloem Sap

[0389] All cloning and molecular biology techniques, including RNA isolation, construction of cDNA libraries and mass sequencing of cDNA libraries can be performed according to standard procedures (Sambrook et al., Molecular cloning: a laboratory manual. 2nd ed. Cold Spring Harbor Laboratory, Cold Spring Harbor, N.Y., 1989). PolyA+ RNA is isolated from phloem sap and plant tissues using methods described by Ruiz-Medrano, Development 126: 4405-4419 (1999).

[0390] Mass sequencing of cDNA libraries is performed using an ABI sequencing machine according to manufacturer's instructions (Applied Biosystems Inc, Foster City, Calif.).

Photoperiodic Induction of Flowering

[0391] Experiments are performed in either controlled environment chambers or in a greenhouse. Manipulation of the day-length in a greenhouse is carried out essentially as described by Takahashi et al., Plant Cell Physiol. 23:1-9 (1982).

Localization of RNA in Sectioned Tissue

[0392] Localization of RNA in paraffin-embedded sectioned tissues is performed essentially as described by Eshed et al., Cell 99:199-209 (1999) and references therein. Localization of RNA in fresh cut sections is performed essentially as described by Xoconostle-Cazares, et al., Science 283:94-98 (1999), Ruiz-Medrano et al., Development 126:4405-4419 (1999), and Koltai and Bird, Plant Physiol. 123:1203-1212 (2000).

Localization of Protein in Sectioned Tissue

[0393] Localization of protein in paraffin- or resin-embedded sectioned tissues is performed essentially as described by Busse and Evert, Int. J. Plant Sci. 160:1-13 (1999), Lucas et al., Science 270:1980-1983 (1995), and Sutherland et al., Int. J. Plant Sci. 160: 1099-1109 (1999).

Plant Transformation

[0394] Plant polynucleotide sequences are subcloned into a binary vector (e.g., pART27 (Gleave, Plant Mol. Biol. 20:1203-1207 (1992)) and introduced into a plant species (e.g., a cucurbit species) by Agrobacterium tumefaciens-mediated leaf-disc transformation (Horsch et al., Science 227:1229-1231 (1985). Standard floral dip procedures may be used, as described for Arabidopsis thaliana (Clough and Bent, Plant J. 16:735-743 (1998)).

Epifluorescence Microscopy and Confocal Laser Scanning Imaging

[0395] Analysis of the spatial distribution of the reporter protein, GFP, in plant tissues is performed using epifluorescence microscopy, according to standard procedures (see, e.g. Lough et al., Mol. Plant Microbe Interact. 13:962-974 (2000)). A Leica MZFLIII stereomicroscope equipped with a DC200 digital camera for imaging is useful for this purpose. Image analysis, display (adjustments in contrast, brightness, etc.) and preparation for plates can be carried out with Adobe Photoshop software (Adobe Systems, Inc., Mountain View, Calif.).

[0396] Alternatively, all permanent images are obtained with a Leica CLSM, using a long-working distance 16× multimedia objective or a 25× oil immersion lens. A low intensity laser (75 mW RYB Krypton/Argon laser [Omnichrome 643-75RYB]) is used to image the spatial distribution of GFP. Two-channel recordings are made using the following filter sets: GFP, 488 nm excitation, 525 nm emission (BPFITC filter). Image analysis, display (adjustments in contrast, brightness, etc.) and preparation for plates can be carried out using Adobe Photoshop software (Adobe Systems, Inc., Mountain View, Calif.).

[0397] While the present invention has been described with reference to the specific embodiments thereof, it should be understood by those skilled in the art that various changes may be made and equivalents may be substituted without departing from the true spirit and scope of the invention. In addition, many modifications may be made to adapt a particular situation, material, composition of matter, method, method step or steps, for use in practicing the present invention. All such modifications are intended to be within the scope of the claims appended hereto.

[0398] All of the publications, patent applications and patents cited in this application are herein incorporated by reference in their entirety to the same extent as if each individual publication, patent application or patent was specifically and individually indicated to be incorporated by reference in its entirety.

[0399] SEQ ID NO: 1-875 are set out in the attached Sequence Listing. The codes for nucleotide sequences used in the attached Sequence Listing, including the symbol “n,” conform to WIPO Standard ST.25 (1998), Appendix 2, Table 1.

The application's sequence listing, which the Patent Office published only in electronic form, follows.

SEQUENCE LISTING (875 sequences)

SEQ ID NO: 1 - DNA, 1819 bp, Cucumis sativus
ctctgtgttgctactacttctttcattctctcttcttcttgattcctcatctttagattcttcttacctttttactccttcaattcaccttcttaattgccggaaaccatgagttttctggtgagtttctggtgattttactctcatgcatgatccaagtagctactcttcctttcccaattacatctaaccatgacttccttccaaggttttggcgtcttccagttcgttttgagacggatcgctaccgattgctgtcgctttttttctgtcttgcagtagcgtctaggagccagagaggatttgaagcagcggtagctgctcaggtccgttgatggatcccaactcctcaggagaagacttggttttcaagaccaggaagccatatactattacaaagcaacgagagcgttggacggaggaggagcacaacagatttctagaggcgctgaagctctatgggcgagcatggcagagaatcgaagaacatattggaactaaaactgcagtccagatacgaagtcatgcgcaaaagtttttttcaaagttggaaaaagaagcacttgtcaaggggattcctgtaggacaaactctggatatagatattccaccacctcggcctaagaggaaaccaagtaatccttatccaaggaaaactcctatatcaaagttgggtgctaatgacgggaaggttttgactttggtgtcttcttcacagaggaaacagatcttagatttggagaaagagccactgaatgagggcactagtggagaagaacaagcaacaattgaaaaggatgcccacgacgacaattactcagaagtatttaccctatcacgagaggccaactccatttcttggaaaaacacaaattgtgtaccttcgcaagttaaactaaatgactcatgtgctttcagggagtttgtgccctcacttaaagagccactccaggataaaggcccgggcaaagttttagaaatggagatctcaagcacttcacaagaaaagtctatgcctgctgaaaagaaagaagctttaagctgcgtactgtctggagatgaaatgcaagctgctcataattatccaaggcatgtgcctgtgcatgtggtagatggaagcttgggagcaaatgttcaagggtcagtaaccgatactctgctgcaggaatcgacttttcatccagcaatggaggttcgaggagagcataatataattgggaatccatctgattgtgtttcctttgaacatcaaaataatgcacctaggtgcgtttatcaatcatatccaacaattcatcctactccatttaccttacttcgccctaaccaagagcattataagtcacttctgcacatgtcctcctcattttcaaatcttgttgtgtctacccttcaacaaaaccctgctgctcatgcaatagctagtttgacagcaacatgttggccctatgtgaatcctgaaacttctgtagattctcccgtttgtgataaggaaggttctggaaccaagcaaatgaaccccaccccaagtatggaagccattgctgcagcaactgtagcagctgcaactgcatggtgggcagcccatggactgctacctttgtgtgctccttttcattctgcctttcccagtgccggtgtatcagctcctgtagtacaatcatcagatacctgtcaaaatcttgagtccaaagacaaagcagaaagttcccaacaaattgttgctttgcaaaatcaacagctggatgcagaacaatcagaagctttaactgctcaacactcaggttccaagttacctactcattcatcttctgattct

SEQ ID NO: 2 - DNA, 1271 bp, Cucumis sativus
  misc_feature (1)...(1271): n = A,T,C or G
gatttanattagtcctgggnaatttaccacttggctcgtcttgttttgctgctggaggagctccggcaagtgatatgatcgatgaatttcagcttcaggaccagctttccttcctcaacgacggctctccgacaatcggcgttaagaacgccgacttgtttttcccgccggcggatttatcgtcaagccccaccggtggaggatttgggtcctacggtggagatgccacttggggtggagggccggttcatcgccggagctgctctgtgaacgacgcgtgcttaggaacagaggatttgaattgtgggttgggttggaagccttgtctttacttcgccagagggttttgtaagaatggaacaagttgccggtttctccacggcggacttggggattccgacgtcagcgccgccgccgttggctcgccgagtaagatcgatgtgatggagcagtgtcatgaacttctcagatccaaatcttctgcacaacaacgcctcgccgctgcttctcagcttatggcttcagctaattccttcccttactctccaaaatctatcaacttccttctccaacagcaacaaaacgattcccaaagagctgccgccgccgccgccgccgccgccgcagcgttaatgatgggggaagatctacacaaattcagtcggtccagtcgacttgaacgaaacgaattctcgttgaacggcagcgccggtatcatcaatccggcgtcaagacagatctacttgactttcccagctgatagcaccttcaaagaagaagatgtatcgaattatttcagcatgtacggtccagttcaagatgtgagaatcccatatcaacagaagagaatgtttggatttgttacttttgtttatcctgaaacagtgaagctcattttggctaaagggaatcctcattttgtttgtgatgctcgtgttcttgttaaaccttacaaggagaaaggcaaagtcccagacaagaaacagcaacaaatcgatagagatttctccccttgtggaactccaactggtttagattcaagagaactttatgatcatcttcaacttgggtcgagaatgttttataattctcaccaagatctgttatggcgaaggaaattggaagaacaacaagctgatcttcaaacgcttgatcttcaaagtcgacgccttttgaatctgcagcttcttgatgtgaagaagaatcagcttccccatcaccaccaccgtgctctttccaccggtagcccaattccttccccgacgcattca

SEQ ID NO: 3 - DNA, 1303 bp, Cucurbita maxima
cggataactgggaggcgcccacatttgaacaccaggggagggacaagccatatgaccccacgatccgatgggggcgactggcattacatgatttgaatggtagggagaagggtaggccatcacaggtctctgtagatgtggatagtagttcttcctcattggatcctttgaactcgaccagctaccatcttcttctttcggcaagacgtgtcgcttatgcatccgatacttctgaagatggctagctacattatgccttgtcaggccttcaactttcatcaactctagaattcgagaaggaattgcttgattcactccgagttgttccactgcctgtacgaacttccgatgaagttcggctgtccagtctactttcatcctacacgggttaccaagaccgcatgctttgctcttgtttttttcggaactgctaatgttgtctctatcgtgtaactcgtgatcgacattactcgcagccccacagccatcagtagagttctcttcctctttaataacttccttgtcagataactgagagttctccacttgagcagtacaagtagtttcgacagatttagactcctccctgtcttgctcgccgcactctttctcgagcaaacagttcatttgatccaccaatctcattccatgcttttgctgaggagttgaaggagctggatacttgtcacttccttctggtagtagtagtagttcatgatcatcaacattgtcgccgctcgatatttccaactcatgtggaacttgattcttgttctcatcgttttccaattcaagatgcaatatggaggcaacagattctttgataggctttaaagaactcgggacggcgctcccgcctgcattgaatgccttatgaacaacatgctgccaaatgttcctcagtttgtccttagacaccggtttctgaaggaactcgatcgcaccaagcgctatgcacttcatcatcgtgctgaggcaatggatgttcgaaattaaaatagtaggcaagtccttaacagcttcaagaaatttaaacgccccatcgtgatcactcgccattacctcgacaatggcgacatgaaacgtttcaggttcgctcgaaatggctaacaatgcatcgttctcattgcagtaagtcacaacaacatactccatttcctccagctttgtttttatctcagcagcagaattgctgtctccatcaaggaggagaactctaagcccctttggaaaatctttccacccatgtaaatcactagcagtgcaaaccatagctcgttgtgcatcgttctcacgtatccta

SEQ ID NO: 4 - DNA, 651 bp, Cucurbita maxima
ggaagacaacaacatagatttctggagaaaatttgttaacgagtactttgcacctcatgccaaaaagaagtggtgcgtttccatgtatggaagtgggcgacaaacaactggagtttttcctcaggatgcatggcattgtgaaatatgcaaacgcaagcctgggcgtggctttgtagaagcaactgctgaagttcttcccaggctttttaagatcaagtatgaaagtggaactatggaggagctactttatcttgacatgccccgtgaatatcataatgcttcgggtgagatcgtcctggattatgcaaaagcaatacaggaaagtgtttttgagcaacttcgcgttgttcgggatggccaacttcgaattgttttttctccagaccttaagatatgttcatgggaattctgtgctcgacgccatgaagaacttattccgaggagattattgatacctcaggttagtcatcttggggcagcagctcaaaagtaccagtctgccattcaaagcgcatcatccaatttatcaactcctgaattgcaaaataattgtaacatgtttgtggcatcagcacgacaattagctaaagccttggaagttccactggtaaatgacttgggatatacaaagagatatgtacgttgtcttcc

SEQ ID NO: 5 - DNA, 852 bp, Cucumis sativus
ttctagcggtggtgggtactctccttattatctacaggaagcattagcgatgttgaagcggtatcttccgtctaatgaggcggagatggactcggatattgatgtttcgggtaaggagatagattctccgttggatgcctactcctctgatcagtttcgaatgtatgagtttaaaattaaaaagtgtacgagaggaagatcgcatgactggaccgagtgtccgtttgctcatcctggcgagaaggctcgccggcgagatccgaggaggtattattattcaggtacggcgtgtgcggattttcggaagggaagctgtgtgaaaggggatgcgtgtgagtttgctcatggagtttttgagtgctggcttcatccggctcgttatcggactcagccgtgcaaggatgggacgagttgccggaggagagtttgtttctttgctcatacaccggagcaacttagggttttgcctcaacaaagtcctcggagtacgagctctatcccttcgtacgatggatcgcctctccgacaagcaatcgaggcctgtgcaaaacaaatgccctatttatcatctccaggaacatcgccaccagtatctcctcgaattgaatctccacctcaatcaccgattattaaatcactaaatcgacctcacgcaccaagttcgatcaaagaaatggttgcatcactgcgaaatttacaactcaataaggaactctgtaagttaccatctccttcttcttcttcttcctcatggaatgttcaagtcggatctcctgtattcggatctccaaaggaatccaccactcgatccggtttatctacccttccagaaacttcaactcctccacgtat

SEQ ID NO: 6 - DNA, 577 bp, Cucumis sativus
ggcattcaccggaagccaacggaggtgagctcacagaaagaaagggctgatggagtcaaattcagagccaagactgaagtaaaagaaagcagtagaagaacgcagagatcctcgtcgatgtataaaggcgttcgacgaaggaaatgggggaaatatgcagcagagattcgcgacccctttcgcggtagaagattatggctcggtacttataacaccgcagaagaagctgctgttgcttatcagagaaagaagcatgagtttgaaagtatgcaatccatggagaattacagcagtgaactaagtggagggaaatttgaagagaagaagatcaaatcacttgttgatgacactgccgaatctgaagaaattatagctatgttttctcatccttcaccatcttctgtacttgatctctgtactggaagtttaagcagcaatggactcaagaatgtaattgaagaattcaaagtggatcaaactagggaacatacaatcaccaaaaagagtaagcctgtgcaagatggactttcaagtacttgaagacaatgcaatgatctgcaatgatttcgatcagtta

SEQ ID NO: 7 - DNA, 981 bp, Cucurbita maxima
gcttcgttctccccgaaagtaaatcgcactctcgtctctcttcttctgctttcatctctcagtttttgactctttattaaaacaaagaaacagagagaatctctccggccgattacttcttcttcttcctcccttccctgtttcttctttatcatcttctttccctgcgctttcaccgacgatggcggttttaaccctcagttccctccccctgggcttccgatttagacccaccgatgaagaactcatcaacttctacctccgctccaagatcaatggaaatcacgaagaagtcagcgttattcgcgaaatcgatgtctgtaaatgggagccctgggatcttcctgatctatcgataataaagacaaaagatcccgagtggttcttcttttgtccacaggacaggaagtatcccaacgggcaccgtttgaagagagctaccgatgctggctactggaaggcaacgggtaaggatcgcaaaatcaagtccggaacaaacttgattggaatgaagaagacattggtattctacaaaggtcgtgctcctaagggaaagagaaccaattgggtagtacatgagtatcgtgccactcttaaggaacttgatggcactaaccctggacagagtgcctttgctctctgtcgtctgtttaagaaacaggatgaaagtattgaagggtcaaatggcgatgaagctgaagctgctatttcatcccctaccacagctgactcatctcctggacctggagactcccattcagagccaatacttcctttagtttctccatcattgccggggcgggctgaaagttctgatgaagtggcatccgaaacagtcgaacatcctgatggttcagctgaaatctcttgttttgattcatataatgcagaagtgagaggctcccttttccttttcatttttattacaagaaattcagcataatctgaattgtatgcatctatgtctatttctcattgcac

SEQ ID NO: 8 - DNA, 679 bp, Cucumis sativus
  misc_feature (1)...(679): n = A,T,C or G
aagacaacaatggtagtttggctcttgggatgttcatgggaaatcagataactgagaacaaaaatatggtttctaatcagaatcaaaatccagtgtttttagggacaggagttgtaaggtcttctcagccgcagcagcaacagcagccactttttcccaaaccagctaatgtgacctttgcttcttcaatgaatttagtgaacaatccccagcttaccaatggatctgggactaatttggttgtggccccaaaacctcctttgcatgatgcattaattcaaggcacgggcattggtgcgatcggcttaggcacgagaggtgtaactgttgcttcaagatctcctacaagtacaatatcatctgatgtgattacaaaatccagcattgaggcgtcttcattttcacccgttccattttcatttggccggggtcggcgaagcagtggagctctggagaaagtggtcgagaggagacaacgaagaatgataaagaacagagagtcagctgcaagatcacgggctcgtaaacaggcttacaccttggaacttgaagcagaagttgcaaaactcaaagaaatgaaccaagagttgcagaagaaacagagagagataatggagacacagaaaaatcaggttttggagaagatgaaatatcagttgggcggcanaagattctgctt

SEQ ID NO: 9 - DNA, 2176 bp, Cucurbita maxima
gctcaaactccccctccaagcgaggccttctcgattcaactattcaacttgtttcttcaatctacttccaggagctggatatgtgcagtggctcaaagaataaagttgctttctcgaattccgccatggaaactaagtttcagaagcttagagatggagctttattctctgcgaattcgatcttgcttgaactatcagcctctgatgatgtagatgggttcaagagagaggtggaagaaaaggatttggatgttgatgaaccaagctgctggtatggaagaggaattgggtcaaagaagatgggttttgaagaaagaactccacttatgatcgctgctatgtatggaagctctaaggttgtcaaatacttaattgagacaggcaaggttgatatcaacagggcttgtggatcagatatgaccactgcccttcactgtgcctctgctggtggctctggttcttcccttgaaaccatcaagctcttgcttgacggatcggctgacgtcgattgcgtcgatgcgaacgggagaaaacctgttgatttgattgtttcagcttgcaggatggtgtgttattcaggaaggaaagctatggagatgttgttgagaggagatggtatggctggggtaggtgatctgagccttttcctagaagaagaccatcagaagatctcagcttccctgtctgcaaaagaaggaagtgacaagaaagagtatcccgttgatatatcgctgcccgacatcaacagcgggatatatggcactgatgatttcaggatgtatactttcaaagtgaagccttgttcgagggcgtattcgcacgattggaccgagtgtcctttcgttcatcctggcgagaatgctaggcgtagagaccccaagaagtacccttatagttgcgtcccgtgccctgaattccgaaagggggcttgtcctaagggagattcctgtgagtatgcacatggtgtctttgagtcttggctccaccctgctcaataccgaacccggctctgcaaggatgagactggctgcacaaggaaggtctgcttctttgctcacagacctgatgagttgcgccctgtatatgcatcgacaggctcaggcatgccttcgcctaggtctctttcgagcagtgctgcagatatgtctaccatgagcccgttggctcttggttcatcgtcgttgtcgttgccgactgcttcaacgcctcccatgtctcccttagcatcggtgtcttcccctaaaaatgggaacttgtggcagaacaagattaaccttactcctccggctctgcagctccctagtagtcggttgaaggcgaccttgagtgcaagagatttggatttagagatggaattgcttggattagaaaagaacgtgagccaaatgcaacatcaacaacagttgatcgacgagatatctcggctctccgctccttcttactggagtgcagacataagcaggagtgcagagttgaagccatcaaaccttgatgacatgtttggatcattagattcttccttgttgtctcagttgcagggcacgtcgctaaaaacgccaatctcggctcaagttcaatctcagaccgggctgcagatgcgccaaaacatgaaccaactccgtgcgagttacccggctaacttatcatcctcacctgtaaagaaaccctcttcatttggctttgattcatcaagtgcagtggcagctgctgtgatgaactcaaggtctgctgcctttgcaaaacgaagccagagtttcattgatcgagctgcagtgacccgccttcctgggcttactggagctgcaaattctgcagctacaatgtcttcccatctctcagattggaactcgcccaatggcaaactagactggggaatgcacagcaacgatctcaacaaactcaagaaatctgcctcgttcgggatccgaaacaatggcatgggaactcccacgttcgcttcaccagtagaggagcctgatgtctcttgggtaaactccttggtgaaagatgttccctcggacaggttcggaatgttcggtgcggagaaacgagcatacaacctcaaaagagacatcaacgagatgctaccgtcctggatggagcagcagttgtatgcagagcaggagcagacagtggcataaacaacagctgctacgattcctactcttcaatatgc

SEQ ID NO: 10 - DNA, 855 bp, Cucurbita maxima
gtagaaacatcctgctcagatccttcaaccactctccgtcgcaagaacaccaaattaattccttcaaccgccatggtttccaaagagaaatccaccgccaaaaagcttcctcctctctgcaacaccaacaacaatgccagagaactccatttccgaggcgttcgtaagaggccttggggccgatacgccgccgagatccgagatcctggcaagaagagccgcgtttggctcggaaccttcgatacggcagaggaggcggcgtatgcttacgataacgccgcgcgccagttccgcggcgcaaaagctaaaaccaatttccctctacctgatgagttgatcgacgtttctcctcgcaagatcagccaaagccctagccctagcagcaccgtcgaatcctcttcctcctccagccaagaaaaaactccctcaccggagatcgtccgtagctacggcgtcgcacgaacttttccgttcattcagccgcagtttttgcatcaagtcggcggaggcggtagcgctcgtcctgttttgttcatggatgcttttgttcgacctgagtttgttgctcagggctatcctattcggtacgattcggcaaggttcgccggcgagatccagaccaaatcggattcattgtccgtggttgactgccggccggcgaaggaaattctcaatctcgatcttaatctcgctccgcccgtggatgcttgatttctccgctaattttgtcctttttgttttggattttttttttaaaaaaaattaatttagttagatctttagaaatagaacaaaaaaaattaacgtactgtaaagaaaaatgaaaaataaaaaatagggttttttttttttttt

SEQ ID NO: 11 - DNA, 1270 bp, Cucurbita moschata
agaagcgatgtacttcgagcttcagctgtcggccgacttcgaggttattaccgtcccatcgcattccattgcagacattgtaagtttgctaaccgaactcatcatcttcacatcctgactcgaccatatatatattcttctcaccatgttacagaattcctgccacgggtaatcgcccatgagcatcgtatctccttcgtcgtctgtgaagacaatctcccacttatcacgtgggtgaagttctcccttgatatcgaacatcttttccagttcgtcgatgagttggccatacccttccaacatcgtaaggtccaccgcacgtccgacagccatcccctgcatttgaaccttggtccgacttcggctgttggtcgagctgctctgcttgtgctggatctctttaggaggtacttgtaaaagtcctaattttctttctttagaagcctttggctggtctgagttctgctctgcatcagtgatttcatttggtgcgctaatcggttgatcagcagccatttcaggtggaactgggctcttggaatgaccgatgatatcgatcccgaacaagcgacagcttggagccacctcagttttcctccccttttccccaagatcgttaacttggtcgctgctctttggattagatgggtgtggagctggacatgtcgactgtgctgctggcgctcccgagaagacggttgaccaaacataattgctgtttcggtcatctgtcaaattctgtaatcgatgctgcgaaacactcctgtttggggaagctaaccaagagccctccttcggagtccttgatatagaattcccaatgctgctaacatccgtttgcttgtaattccacattgcgtgattttcaaatcgtttcatttcagcagcagtaccgctaagctgtgttctatcgtcgtgtgattgagttgatcctggatggcgtagagttgttacggttgaattatcagaatctggaatgtcgagtggaggccgaagccttttattctttaccgaaaccgattgtggaatgctcggggacgtaggcgccacaaaaggttcaatctcccatggcgaaactctatcaggtcgaggaatagatgcaagttcatcccattgaattcttagcgatcgccattttgaattgggccagtgaggagatatgtcgtcaactccaacaatggtacccgaaaaccttctctcaggagactcctctccctcgaatctcatcttgaatctcatcccaactaagaacttcctgttcatcgcttct

SEQ ID NO: 12 - DNA, 989 bp, Cucurbita maxima
  misc_feature (1)...(989): n = A,T,C or G
cggggnaaattagatcacaacacaccnagcgttctcagggtaatttttcattgaggttagccggaaaatggtcaacatgcttgaaactgatctctgtctcgggcttcccggcggcggaggtggagagccggagactccgaaaggtaatggaaaaagaggattctctgagacggttgatctgaaactcaatatccaatctaagcctgtggttaccgtcgatctgagtaccacacagaacatgaagagtactgattcagaggatattagctccaaggatcctgcaaagccacctgccaaggcacaagtcgtggggtggccaccagtccgttcctaccgaaagaacgccatgtctcaaaagaatcccgatggtggagaaaagggtagtggctcagctatgttcgtcaaagtttgtatggatggcgcaccatatctacgaaaggtggacctaaagacgtacaaaagctaccaagagctctcgaacgccttggctaagatgttcagctccttcaccatggctggtgagtatggggcccaaggaatgatagatttcatgaacgaaagcaagttgatggatcttctaaacagctctgaatacgtgccaacctatgaagataaggatggtgattggatgctggtgggagatgtcccatgggagatgttcgttgattcatgcaggcgcttaaggataatgaagggatcggaagctatcgggctcgccccaagagcgatggaaaaatgcaaaagcagaagctgaaagaggagtctgattgcaatatttgtgtttttttttttttttaatttaaatttaaattttgaatgttgtgattggtaaatagatattaaaagagatttgggagattaattaattaatttgtaataggaaacaagaaaataaactctctctctctctatacctctctctatctctctcctatcctgtctggctgtttgtttgtttgtctgtttaatcacaaaaaacaattataatg

SEQ ID NO: 13 - DNA, 1382 bp, Cucurbita maxima
tagaagcgatgtgcatatgccggacatggatggattcaaacttctagagcaagttggtctggagatggatttgcctgttatcatgatgtcagcagatgatggaaagaatgttgtgatgaagggagtgattcatggtgcttgcgactacctgatcaaaccggttcgaatcgaagcgctcaggaacatatggcaacatgtagttcggaagagaaagagtgaatggaaggatttagagcaatctggaagcatggacgatggagatcgggatcaaaatctatctgaaggtgcaaattattcatcttcggcgtatgatggaagttggaacagctcgaagaggaagagggatgctgaagaagagctcgaggagagggacgatacatcaacgttaaagaagccgagggtggtatggtcagttgagctccatcaacaatttgtcatagcagttgatcagctaggcattgacaaggctgtccctaaaaagatattggagttgatgaacgttccggggctttctcgagaaaacgttgccagtcaccttcagaaatatcgcttatatcttagaaggcttagtggggtatcgccacacccaagtaatctgaacaatgcttttatgaaccctcaagatcatcctccttttgggtcaatggcttcatacaatgggattgatcttcagacgcttttggtcaccggtcaactctcgccgcaaagtctcgctgcccttcaagccaccggacttcgtcggcctaccgcgaaatctagcttaccgatggcccttgttgatcagaccaacatattcagctttgaaaatccaaaactgaggtttggtgaggaccaaacacaacacctgaataaaactaaacctgcaagcttgtttcatgggattccaacaaaaatggagccaaagcagcttgccaatatgcagcacccttctgtgcagactcagaggaacatgaacatgccactcaatatcaagagcgaacatggtggcactcagctaatgcatttgtctcagcagcaaactgtagggcagactctaaataactctactgttagccacctacctggaattccatcgacattaaggaacccgatcatatcaggtagcgttacaacggggaacgggactgctgataatagccacggacctcgatacaacctagtttcgcccacatcggttatggtgaactatccaatgagccaaaccacagaagtgtttcaagaagaaatgaattcaaatctaaaagtatcgagcggagtaatgtcgagttatgatgtttttagtgacttgcatatgcagaaagcccatgactgggattatcaaaatgtaagcactttggcctttggtactccacaccatggaaacttcattcaccatcgcttct

SEQ ID NO: 14 - DNA, 1274 bp, Cucurbita maxima
agaagcgatggatgaaatgaaagtgaaaccggaggaatcagtggccgtcggcacggcggtgtgttcttcttcttcttcgtcgggttcgagcgtcactccccagccgatcgaagggatacacgatgtaggtccgcctccatttctcactaagacctttgaaatggtggaagatccattgacggactccattgtttcgtggagtaaagctcgtaatagtttcatcgtttgggattatcacaaattctccagttccttgcttcctcgatacttcaaacactccaatttctctagtttcgttcgtcagctcaatacttatggttttcgaaaagtcgatcctgatcgttgggagttcgcgaatgaggggtttctgggaggacagcgacatctgctgagaacgataaagaggaggagacattcacctcaaagcttccagcaccaccaaggaggaatatgtgtagaattgggtgaatttggactggaaggtgaactcgagaggttgaaaagggacagaagctcgttaatggcggaattggtaagattgcgtcagcaacaccagagctcgagagagcaaataatagccatggaggataggctagagaagtctgagaataaacagaagcagatcatgacattcctcagcaaagcccttaagaatccatcattcgttcagaaatttatccatagtaatcagggaagagaattgagaggcgttgaaattggacgaaagcgaagactgacttccggctcaagtgtagagaatctccaggaagagagtgtaccagcggctgttaaacaagaagagccagatatggagacgctgttagcagtcaactttgaaggcgagtcaaacggcgagatcacagaccctgtttctgatggcattctcatggcagccatggatgtgggtcactcagctcccgaggaactggggttcttcagtcaactctgggctgaagatccttgggctggatatccagaggaagaacccataatagttagcaatcaatcggacatcgatgtggaagtggaggatctgatcgccgagccccctgattggcctgagaatttgcaggaactcgtcgatcaaatggagtttctccggccgaagccataggcataagaatatagggagtgaaatcaatgtgttcagctggctctggtgtagaaaaggagtgggtggaggaggatgcagaggagccacagattatcatatcctttgaaactcattgggctttcaatattatctacttcaatatttttggttgttgtcttcc

SEQ ID NO: 15 - DNA, 606 bp, Cucurbita maxima
cggataactggagaaaatatggacaaaaacaggttaaaggaagcgagtatcctcggagttattacaagtgcacacatccgaactgtcaggtcaagaagaaggtcgagcgatctcatgaaggccatataacagagatcatctataaaggaacgcatacccatgtaaaaccctcaccgaatcgacgagcatcggattcccatatcaatatgcaactagacatccctgtacaagcaggccaacagaatgctgaagttcccctgtgggaagattcacaaaaagggactcctgattggatgcatagcaaccttgaggtgagttcttcagcatcattgggtcctgaatatggcaatcatattgaaacagctgaggccattgatgcctcatccacattctctaatgatgaagatgaagatgatagaggaacacatggaagtataacaatgggatatgagggggaaggagatgaatctgagtctaagaaaaggaaactcgacgcctatgtaacggaaatgagtggggctactagagctatccgtgagcctagagttgttgttcagactaccagtgaagtagatattctcgatgatggctatcgttggcgtaaat

SEQ ID NO: 16 - DNA, 612 bp, Cucurbita maxima
taagttggctgagctttggagcagtgatcccaagcgcgccaaaaggatattggcaaatcgacagtctgctgctcgctcaaaagagaggaaggcacgatatatacaagagttggagcgcaaagtgcaaacccttcaaacggaagcaactactctatcagcccaattgactctcttccagcgagacacaacgggtctcagtactgagaatacagagcttaagcttcgtttgcaggctatggagcaacaagcccaaatgcgtgatgctttgaacgaagcattgaagaaggaagttgagaggcttaaaattgctactggagaaatgatgagcccttccgagtcttttaacttgggaatgcatcacatggcatacgccccatcgtctttcattcaactttcacagcaaccagggtctgctggccctcaaaacattcaaatgccaccatataaccattccccatccaacatgtctagccaccctctgcatccatcagactctcattctctctcggaggtgctacaaagcgaccctcttggtcgattacagggtctcgatatcagtagtaaaggatcgtcgcttgtgaaatccgaggacccttctctctccgctagtgt

SEQ ID NO: 17 - DNA, 671 bp, Cucurbita maxima
agtgaatgcgactaattcctctgccgtcattgatagttatcacaatacttcttccggcgcgcccaagactgtggatgatgtgtggagggagattgtatcgggtgagaggaaggagttgaaggaggaggttactgatgagttgataaccctcgaggattttcttgtgaaaactggagctgcgcctgtcgaggatgtcaaattgccgcagacggagaggctgagtggagggattttttcgtttgattcaattccaggcagctcgtttcaggcagtggaaaaggttgaaggatccattgtgggatttgggagtggggttgatttggttggcagtggaggaagtgtggggagagggaaaagagggcgagctgccttggagcccttggataaggctgctgagcaaagacagaggaggatgatcaagaatagggagtctgctgcaaggtctagggaaaggaagcaggcttatcaagtggagttagagtcgttagttgcaaaattagaggaggagaacgagcggcttttgagagaaaaggccgagaggagtaaggaaaggcataagcagctaatggaaagggtgattcctgtggttgaaaagcgacgacccccacgagggattcggcgagtgaattccatgaaatggtgaactacttatcttccacgagacgcattca

SEQ ID NO: 18 - DNA, 672 bp, Cucurbita maxima
aagtatggtacggtgttccaggaaacggtgccggtaaattagaagaggctatgagaaagcatttacctgatctcttcgacgaacaacccgatttgcttcataaattggttacgcaactttctccgtccatactgaaatctgagggtgtacctgtatataggtgtattcagaatcctggagagtttgttttgaccttccctcgcgcataccattcgggattcaacagtggtttcaattgtgccgaggcagttaatgtcgctccggttgactggttgccccacggtcaaattgccgtagaattatatcgtgagcagggacgaagaactactatttcccacgataaactactgctcggtgcagcgagggaagctgtgagagcacactgggaacttaatttacagaaaaggaacactttggataacttaagatggaataatgtttgtggaaaagatggagtcctagcaagagcattcaagacacgtgttgagctggagtgtgcacggaggaacattccgtgcggttcttctcgggcaatgaagatggaaagcaactttgatgcctctaatgagagggaatgcagttcatgcctctttgacttgcatttgtctgcagttgggtgccgttgttcaccagataagtatgtgtgcttgaatcatgcaaaccagttgtctt

SEQ ID NO: 19 - DNA, 736 bp, Cucurbita moschata
tttttcgtaggcaagatgtccccctgctgcagcaatatctcaacaatcatttcagagaatttaggcatatccacgctggtccagttccacaggtgtttcatccagtgcatgatcagtcattttatttgactttggaacacaagagaaagctcaaggaggaatatggaattgaaccttggacgtttgtccaaaatctgggagatgctgtctttattcctgctggttgtcctcatcaagtcagaaacttgaagtcatgcataaaggttgctatggactttgtctcacctgagaacgtgggagagtgcatccacttgactgaagaatttcgcagactcccgtcaaatcattgggctaaggaggacaagttggaggtaaagaaaatgagcgttcatgctatgaaagcgacaattgcttgtttgaaggaaaagtgcaagtgatttgcctaatttaggatatttcttatgagcctcgggggcaatcctatgaccagaagaacgtgcacaaggtttgagttggtatgtaggatgactaatcctgaacttttgtgataccaactgttttgtagcagtagaactatgccccatacattttgtacaatgattcattggctctgttactcccttgtatgatataatagtttatccataacttacgccgctatgtcatttatcagctacgagattcggggtatcgctttcgacccctttttggcatttttgtatagataacatcgctt

SEQ ID NO: 20 - DNA, 745 bp, Cucurbita moschata
aagacaacctttctgtctgataaaacaaaacttttgaaaaacaagaagttaaatcctagtccgtggcctccttcttccaaatcattgcataaagggagagttcaaaatagtgttcagcatttttcttgtccatcaaaagaatgtggcagctgcagtgaaagtcttctcgaattgagatgtattttcccactaagttggacaaaggaactcgaagtgaacgcagaagaaatcgtatgcagctatgactttccagagtctgttgattcatcatcaaactgtactttgtgttttggtgaggaccataaagttgatgaacttgaagagttccagaaagtagctgtccgggaggattcaaatgataactatttgtattatcccaacctttttcgcatccgtcttgatgaccttgaccattttcagaggcactggattagaggtcatcctgtaattgtgcgtaatgtactggagacgtctgatctgacatgggatccagtagttatgtttcgcacttaccttgaaagaatcatttcgagatatgaaaatggtacgagtctcccagaagcttccaataacttggactggtgcgaggtagaaattggcattaggcagtactttatgggttctcttaaggggaagacacacacaaacacttgtaacaacatgttaaaattaaaaggttggctttcttcccatttgtttcaagagaagtttccagctcactatgcagaaataatgcgaattctac

SEQ ID NO: 21 - DNA, 669 bp, Cucumis sativus
gccgatttgcagttaccgccgggatttaggtttcatccaactgacgacgagcttgtgacgcattatttgtgtcgtaaatgtgcgtcgcagccgatttcggtgccgattattgctgaaatcgatctttacaaatataatccatgggatttgcctgaaagggctttgtatggagagaaagagtggtatttcttttcaccgagagaccggaagtatccgaacggttcgaggccgaaccggtcggctgggagtggatattggaaggcgaccggagctgataaaccgataggaaggccgaaggcggttgggattaagaaggctttggttttttattctgggaaagctcctaagggtgagaaaaccaattggatcatgcacgagtaccggctcgctgatgtggaccgctcggctcgaaagaagaatagtctaaggctagacgattgggtactttgtcgcatatacaacaaaaagggggcaatcgagaaacagaacccgccggagatgaacacgattgggttctttgaaaatgaggaacaagaggaaaagcccgaaattctgaatgacagagcaatttctgggcgaatcccgtcggcatcacctttgcaaggtccgccatcgtccggcgtagttaacgattacgtatactttgacccctcagattcaattcctcgt

SEQ ID NO: 22 - DNA, 661 bp, Cucumis sativus
  misc_feature (1)...(661): n = A,T,C or G
atcacacccacaaagaaaaaacacttctaacttaacttacactactttatatatatatattatacacacacgtacatatacagttatggatttttctgatgcttcttcgtcttcccatcgttccactctttccgacgacgagcttcttctggcgtctcgataccccaagaagcgagcggggagaaagaagtttaaggaaactcgtcatcctatttatcgtggtgtgcgactgaggaattctggtaagtgggtttgtgaagttagagagcctaataagaagacacggatttggcttggaactttccccactgctgagatggctgctcgagctcatgatgtggctgccatcgctcttaggggaaggtcggcttgtcttaattttgctgactctgcttccacgcttcacattccggctagtgttgatcctaaggatattcagagggctgcggcggaggctgccgaggcattccggccgcaggatgatgagttgacgccggcggtggtggatgangaggggttttatttggagaggaagtggagtttgggatgcccgggttgttgacggatatggcggaggcaatgttgttgccgccgcccaattgtgtggggaattacgacaatgaccactttggggctaattctatggattttgatgccgaca

SEQ ID NO: 23 - DNA, 556 bp, Cucurbita maxima
  misc_feature (1)...(556): n = A,T,C or G
ttggccaattgtttgattcttttggcgcaggggagaacaggggattgcgcctctgttttggttcaacacaatcaatctctgttcgcttatcagtgcaagacttgcgatcgttgttttccttcttttcaagccttgggtggacatagagctagccataagaaacccaaaatctctaattctcttcaaacccacgaccctcaatttcacctctccttgcagttatccaccggccgaccaccggcgagtttcgccgccggtgacgtcgttaagtctaaggttcatgagtgttccatttgtggagcggagttttcttctgggcaggcacttggtggtcatatgagaagacatagagcgttgacctctacggcgtcggtggcgagtagaggtgctactgctacgccgcagttgcaggagttgatgattaagaaagagaggaatgtgttggagttggaccttaaccttccggcgccagaggatgaccggcaccggacggcggtggctgtgttctccgccgcatcgtcactggtggattgtcattactgattgattntttttt

SEQ ID NO: 24 - DNA, 734 bp, Cucurbita maxima
  misc_feature (1)...(734): n = A,T,C or G
gggggtgggaaaagattcggttcttgaataaccagtgttgttggtaagggaaccgggngaaagaaatggcgccagtggggttgcctccagggttcaggttccatcccaccgatgaagagcttgtcaattactatctcaagaggaagatcagtggccaagtaatcgagcttgatatcattccagaggtcgatctctacaaatgcgagccttgggaattatcagaaaagtcgtttctgcccagtcgagacccggaatggtacttctttgggccgagagataggaagtatccaaatgggtttagaacaaacagagccacgagagcggggtattggaagtcaactggaaaagacaggcgagtgacttctcatcaacgtgccattgggatgaaaaaaacacttgtttactatagaggccgagcccctcaaggcattaggaccgactgggtcatgcatgaatatcgcctggacgacaaggattgtgaagacagctctggtattcaggattcttacgcgttgtgtagagtgttcaagaagaatggaatatgttcggaggtggaagaacaattgagcgggcaaagcagcagcagcagtttgtcatttatagacaactcaaattcaacatcacaaactttggtcaatgattacgaaactttatctcctgatgttctcatgccatcaccttcgtcatcttgtgtcgaggaagaagaaaggacgattcatggatgcagttcatta

SEQ ID NO: 25 - DNA, 621 bp, Cucurbita maxima
gggcaaatccccaaacccaaattaacacacggattacacaaattcccggtttaatggagaattatcagatgttcttcccttgctccaacggcggcggactgtcggcttatagtcaactcgacatctcatccggcaccgcctctgacatgttccggaattttcacggcggcgatccgcaagcaagtggcgttttggggcttaagacagaggtggttacggcggcggtggaagccgacaggaactgtggcggcagcgcaaataagaaaggggagaagaaggtgaggaaacccagatatgcttttcagacgaggagtcaagttgacattcttgacgatggatatcgttggagaaagtatggtcaaaaagcagtcaaaaacaacaagtttcctaggagctattatcggtgcacgcatcaagggtgcaatgtgaagaagcaagtgcaaagactaaccaaagatgaaggggtggtggtaacgacgtatgaaggcatgcatacacactccattgataaaccaacagacaactttgaacaaatcttgagtagaatgcagatttatagtactcctttttgagctcaaactcagcatccgttccgtttcataaccaagaacgagaacgaga

SEQ ID NO: 26 - protein, 495 aa, Cucumis sativus
MDPNSSGEDLVFKTRKPYTITKQRERWTEEEHNRFLEALKLYGRAWQRIEEHIGTKTAVQIRSHAQKFFSKLEKEALVKGIPVGQTLDIDIPPPRPKRKPSNPYPRKTPISKLGANDGKVLTLVSSSQRKQILDLEKEPLNEGTSGEEQATIEKDAHDDNYSEVFTLSREANSISWKNTNCVPSQVKLNDSCAFREFVPSLKEPLQDKGPGKVLEMEISSTSQEKSMPAEKKEALSCVLSGDEMQAAHNYPRHVPVHVVDGSLGANVQGSVTDTLLQESTFHPAMEVRGEHNIIGNPSDCVSFEHQNNAPRCVYQSYPTIHPTPFTLLRPNQEHYKSLLHMSSSFSNLVVSTLQQNPAAHAIASLTATCWPYVNPETSVDSPVCDKEGSGTKQMNPTPSMEAIAAATVAAATAWWAAHGLLPLCAPFHSAFPSAGVSAPVVQSSDTCQNLESKDKAESSQQIVALQNQQLDAEQSEALTAQHSGSKLPTHSSSDS

SEQ ID NO: 27 - protein, 399 aa, Cucumis sativus
MIDEFQLQDQLSFLNDGSPTIGVKNADLFFPPADLSSSPTGGGFGSYGGDATWGGGPVHRRSCSVNDACLGTEDLNCGLGWKPCLYFARGFCKNGTSCRFLHGGLGDSDVSAAAVGSPSKIDVMEQCHELLRSKSSAQQRLAAASQLMASANSFPYSPKSINFLLQQQQNDSQRAAAAAAAAAAALMMGEDLHKFSRSSRLERNEFSLNGSAGIINPASRQIYLTFPADSTFKEEDVSNYFSMYGPVQDVRIPYQQKRMFGFVTFVYPETVKLILAKGNPHFVCDARVLVKPYKEKGKVPDKKQQQIDRDFSPCGTPTGLDSRELYDHLQLGSRMFYNSHQDLLWRRKLEEQQADLQTLDLQSRRLLNLQLLDVKKNQLPHHHHRALSTGSPIPSPTHS

SEQ ID NO: 28 - protein, 424 aa, Cucurbita maxima
MVCTASDLHGWKDFPKGLRVLLLDGDSNSAAEIKTKLEEMEYVVVTYCNENDALLAISSEPETFHVAIVEVMASDHDGAFKFLEAVKDLPTILISNIHCLSTMMKCIALGAIEFLQKPVSKDKLRNIWQHVVHKAFNAGGSAVPSSLKPIKESVASILHLELENDENKNQVPHELEISSGDNVDDHELLLLPEGSDKYPAPSTPQQKHGMRLVDQMNCLLEKECGEQDREESKSVETTCTAQVENSQLSDKEVIKEEENSTDGCGAASNVDHELHDRDNISSSEKNKSKACGLGNPCRMKVDWTAELHRKFVQAVEQLGVNQAIPSRILELMKVEGLTRHNVASHLQKYRMHKRHVLPKEEDGSWSSSKDPMRKNYYPHLQRPVMAYPSPYHSNHVMPVAPIGSWGHMACPSPGVQMWAPPSYP

SEQ ID NO: 29 - protein, 189 aa, Cucurbita maxima
MYGSGRQTTGVFPQDAWHCEICKRKPGRGFVEATAEVLPRLFKIKYESGTMEELLYLDMPREYHNASGEIVLDYAKAIQESVFEQLRVVRDGQLRIVFSPDLKICSWEFCARRHEELIPRRLLIPQVSHLGAAAQKYQSAIQSASSNLSTPELQNNCNMFVASARQLAKALEVPLVNDLGYTKRYVRCL

SEQ ID NO: 30 - protein, 283 aa, Cucumis sativus
SSGGGYSPYYLQEALAMLKRYLPSNEAEMDSDIDVSGKEIDSPLDAYSSDQFRMYEFKIKKCTRGRSHDWTECPFAHPGEKARRRDPRRYYYSGTACADFRKGSCVKGDACEFAHGVFECWLHPARYRTQPCKDGTSCRRRVCFFAHTPEQLRVLPQQSPRSTSSIPSYDGSPLRQAIEACAKQMPYLSSPGTSPPVSPRIESPPQSPIIKSLNRPHAPSSIKEMVASLRNLQLNKELCKLPSPSSSSSSWNVQVGSPVFGSPKESTTRSGLSTLPETSTPPR

SEQ ID NO: 31 - protein, 179 aa, Cucumis sativus
GIHRKPTEVSSQKERADGVKFRAKTEVKESSRRTQRSSSMYKGVRRRKWGKYAAEIRDPFRGRRLWLGTYNTAEEAAVAYQRKKHEFESMQSMENYSSELSGGKFEEKKIKSLVDDTAESEEIIAMFSHPSPSSVLDLCTGSLSSNGLKNVIEEFKVDQTREHTITKKSKPVQDGLSST

SEQ ID NO: 32 - protein, 253 aa, Cucurbita maxima
MAVLTLSSLPLGFRFRPTDEELINFYLRSKINGNHEEVSVIREIDVCKWEPWDLPDLSIIKTKDPEWFFFCPQDRKYPNGHRLKRATDAGYWKATGKDRKIKSGTNLIGMKKTLVFYKGRAPKGKRTNWVVHEYRATLKELDGTNPGQSAFALCRLFKKQDESIEGSNGDEAEAAISSPTTADSSPGPGDSHSEPILPLVSPSLPGRAESSDEVASETVEHPDGSAEISCFDSYNAEVRGSLFLFIFITRNSA

SEQ ID NO: 33 - protein, 221 aa, Cucumis sativus
DNNGSLALGMFMGNQITENKNMVSNQNQNPVFLGTGVVRSSQPQQQQQPLFPKPANVTFASSMNLVNNPQLTNGSGTNLVVAPKPPLHDALIQGTGIGAIGLGTRGVTVASRSPTSTISSDVITKSSIEASSFSPVPFSFGRGRRSSGALEKVVERRQRRMIKNRESAARSRARKQAYTLELEAEVAKLKEMNQELQKKQREIMETQKNQVLEKMKYQLGG

SEQ ID NO: 34 - protein, 686 aa, Cucurbita maxima
MCSGSKNKVAFSNSAMETKFQKLRDGALFSANSILLELSASDDVDGFKREVEEKDLDVDEPSCWYGRGIGSKKMGFEERTPLMIAAMYGSSKVVKYLIETGKVDINRACGSDMTTALHCASAGGSGSSLETIKLLLDGSADVDCVDANGRKPVDLIVSACRMVCYSGRKAMEMLLRGDGMAGVGDLSLFLEEDHQKISASLSAKEGSDKKEYPVDISLPDINSGIYGTDDFRMYTFKVKPCSRAYSHDWTECPFVHPGENARRRDPKKYPYSCVPCPEFRKGACPKGDSCEYAHGVFESWLHPAQYRTRLCKDETGCTRKVCFFAHRPDELRPVYASTGSGMPSPRSLSSSAADMSTMSPLALGSSSLSLPTASTPPMSPLASVSSPKNGNLWQNKINLTPPALQLPSSRLKATLSARDLDLEMELLGLEKNVSQMQHQQQLIDEISRLSAPSYWSADISRSAELKPSNLDDMFGSLDSSLLSQLQGTSLKTPISAQVQSQTGLQMRQNMNQLRASYPANLSSSPVKKPSSFGFDSSSAVAAAVMNSRSAAFAKRSQSFIDRAAVTRLPGLTGAANSAATMSSHLSDWNSPNGKLDWGMHSNDLNKLKKSASFGIRNNGMGTPTFASPVEEPDVSWVNSLVKDVPSDRFGMFGAEKRAYNLKRDINEMLPSWMEQQLYAEQEQTVA

SEQ ID NO: 35 - protein, 212 aa, Cucurbita maxima
MVSKEKSTAKKLPPLCNTNNNARELHFRGVRKRPWGRYAAEIRDPGKKSRVWLGTFDTAEEAAYAYDNAARQFRGAKAKTNFPLPDELIDVSPRKISQSPSPSSTVESSSSSSQEKTPSPEIVRSYGVARTFPFIQPQFLHQVGGGGSARPVLFMDAFVRPEFVAQGYPIRYDSARFAGEIQTKSDSLSVVDCRPAKEILNLDLNLAPPVDA

SEQ ID NO: 36 - protein, 355 aa, Cucurbita moschata
RPDRVSPWEIEPFVAPTSPSIPQSVSVKNKRLRPPLDIPDSDNSTVTTLRHPGSTQSHDDRTQLSGTAAEMKRFENHAMWNYKQTDVSSIGNSISRTPKEGSWLASPNRSVSQHRLQNLTDDRNSNYVWSTVFSGAPAAQSTCPAPHPSNPKSSDQVNDLGEKGRKTEVAPSCRLFGIDIIGHSKSPVPPEMAADQPISAPNEITDAEQNSDQPKASKERKLGLLQVPPKEIQHKQSSSTNSRSRTKVQMQGMAVGRAVDLTMLEGYGQLIDELEKMFDIKGELHPRDKWEIVFTDDEGDTMLMGDYPWQEFCNMVRRIYIWSSQDVKMMSSVSKLTMSAMECDGTVITSKSADS

SEQ ID NO: 37 - protein, 228 aa, Cucurbita maxima
MVNMLETDLCLGLPGGGGGEPETPKGNGKRGFSETVDLKLNIQSKPVVTVDLSTTQNMKSTDSEDISSKDPAKPPAKAQVVGWPPVRSYRKNAMSQKNPDGGEKGSGSAMFVKVCMDGAPYLRKVDLKTYKSYQELSNALAKMFSSFTMAGEYGAQGMIDFMNESKLMDLLNSSEYVPTYEDKDGDWMLVGDVPWEMFVDSCRRLRIMKGSEAIGLAPRAMEKCKSRS

SEQ ID NO: 38 - protein, 460 aa, Cucurbita maxima
RSDVHMPDMDGFKLLEQVGLEMDLPVIMMSADDGKNVVMKGVIHGACDYLIKPVRIEALRNIWQHVVRKRKSEWKDLEQSGSMDDGDRDQNLSEGANYSSSAYDGSWNSSKRKRDAEEELEERDDTSTLKKPRVVWSVELHQQFVIAVDQLGIDKAVPKKILELMNVPGLSRENVASHLQKYRLYLRRLSGVSPHPSNLNNAFMNPQDHPPFGSMASYNGIDLQTLLVTGQLSPQSLAALQATGLRRPTAKSSLPMALVDQTNIFSFENPKLRFGEDQTQHLNKTKPASLFHGIPTKMEPKQLANMQHPSVQTQRNMNMPLNIKSEHGGTQLMHLSQQQTVGQTLNNSTVSHLPGIPSTLRNPIISGSVTTGNGTADNSHGPRYNLVSPTSVMVNYPMSQTTEVFQEEMNSNLKVSSGVMSSYDVFSDLHMQKAHDWDYQNVSTLAFGTPHHGNFIHHRF

SEQ ID NO: 39 - protein, 368 aa, Cucurbita maxima
MDEMKVKPEESVAVGTAVCSSSSSSGSSVTPQPIEGIHDVGPPPFLTKTFEMVEDPLTDSIVSWSKARNSFIVWDYHKFSSSLLPRYFKHSNFSSFVRQLNTYGFRKVDPDRWEFANEGFLGGQRHLLRTIKRRRHSPQSFQHHQGGICVELGEFGLEGELERLKRDRSSLMAELVRLRQQHQSSREQIIAMEDRLEKSENKQKQIMTFLSKALKNPSFVQKFIHSNQGRELRGVEIGRKRRLTSGSSVENLQEESVPAAVKQEEPDMETLLAVNFEGESNGEITDPVSDGILMAAMDVGHSAPEELGFFSQLWAEDPWAGYPEEEPIIVSNQSDIDVEVEDLIAEPPDWPENLQELVDQMEFLRPKP

SEQ ID NO: 40 - protein, 201 aa, Cucurbita maxima
DNWRKYGQKQVKGSEYPRSYYKCTHPNCQVKKKVERSHEGHITEIIYKGTHTHVKPSPNRRASDSHINMQLDIPVQAGQQNAEVPLWEDSQKGTPDWMHSNLEVSSSASLGPEYGNHIETAEAIDASSTFSNDEDEDDRGTHGSITMGYEGEGDESESKKRKLDAYVTEMSGATRAIREPRVVVQTTSEVDILDDGYRWRK

SEQ ID NO: 41 - protein, 203 aa, Cucurbita maxima
KLAELWSSDPKRAKRILANRQSAARSKERKARYIQELERKVQTLQTEATTLSAQLTLFQRDTTGLSTENTELKLRLQAMEQQAQMRDALNEALKKEVERLKIATGEMMSPSESFNLGMHHMAYAPSSFIQLSQQPGSAGPQNIQMPPYNHSPSNMSSHPLHPSDSHSLSEVLQSDPLGRLQGLDISSKGSSLVKSEDPSLSAS

SEQ ID NO: 42 - protein, 213 aa, Cucurbita maxima
VNATNSSAVIDSYHNTSSGAPKTVDDVWREIVSGERKELKEEVTDELITLEDFLVKTGAAPVEDVKLPQTERLSGGIFSFDSIPGSSFQAVEKVEGSIVGFGSGVDLVGSGGSVGRGKRGRAALEPLDKAAEQRQRRMIKNRESAARSRERKQAYQVELESLVAKLEEENERLLREKAERSKERHKQLMERVIPVVEKRRPPRGIRRVNSMKW

SEQ ID NO: 43 - protein, 223 aa, Cucurbita maxima
VWYGVPGNGAGKLEEAMRKHLPDLFDEQPDLLHKLVTQLSPSILKSEGVPVYRCIQNPGEFVLTFPRAYHSGFNSGFNCAEAVNVAPVDWLPHGQIAVELYREQGRRTTISHDKLLLGAAREAVRAHWELNLQKRNTLDNLRWNNVCGKDGVLARAFKTRVELECARRNIPCGSSRAMKMESNFDASNERECSSCLFDLHLSAVGCRCSPDKYVCLNHANQLS

SEQ ID NO: 44 - protein, 144 aa, Cucurbita moschata
FRRQDVPLLQQYLNNHFREFRHIHAGPVPQVFHPVHDQSFYLTLEHKRKLKEEYGIEPWTFVQNLGDAVFIPAGCPHQVRNLKSCIKVAMDFVSPENVGECIHLTEEFRRLPSNHWAKEDKLEVKKMSVHAMKATIACLKEKCK

SEQ ID NO: 45 - protein, 248 aa, Cucurbita moschata
KTTFLSDKTKLLKNKKLNPSPWPPSSKSLHKGRVQNSVQHFSCPSKECGSCSESLLELRCIFPLSWTKELEVNAEEIVCSYDFPESVDSSSNCTLCFGEDHKVDELEEFQKVAVREDSNDNYLYYPNLFRIRLDDLDHFQRHWIRGHPVIVRNVLETSDLTWDPVVMFRTYLERIISRYENGTSLPEASNNLDWCEVEIGIRQYFMGSLKGKTHTNTCNNMLKLKGWLSSHLFQEKFPAHYAEIMRIL

SEQ ID NO: 46 - protein, 223 aa, Cucumis sativus
ADLQLPPGFRFHPTDDELVTHYLCRKCASQPISVPIIAEIDLYKYNPWDLPERALYGEKEWYFFSPRDRKYPNGSRPNRSAGSGYWKATGADKPIGRPKAVGIKKALVFYSGKAPKGEKTNWIMHEYRLADVDRSARKKNSLRLDDWVLCRIYNKKGAIEKQNPPEMNTIGFFENEEQEEKPEILNDRAISGRIPSASPLQGPPSSGVVNDYVYFDPSDSIPR

SEQ ID NO: 47 - protein, 186 aa, Cucumis sativus
  VARIANT (1)...(186): Xaa = Any Amino Acid
SHPQRKNTSNLTYTTLYIYIIHTRTYTVMDFSDASSSSHRSTLSDDELLLASRYPKKRAGRKKFKETRHPIYRGVRLRNSGKWVCEVREPNKKTRIWLGTFPTAEMAARAHDVAAIALRGRSACLNFADSASTLHIPASVDPKDIQRAAAEAAEAFRPQDDELTPAVVDXEGFYLERKWSLGCPGC

SEQ ID NO: 48 - protein, 180 aa, Cucurbita maxima
LANCLILLAQGRTGDCASVLVQHNQSLFAYQCKTCDRCFPSFQALGGHRASHKKPKISNSLQTHDPQFHLSLQLSTGRPPASFAAGDVVKSKVHECSICGAEFSSGQALGGHMRRHRALTSTASVASRGATATPQLQELMIKKERNVLELDLNLPAPEDDRHRTAVAVFSAASSLVDCHY

SEQ ID NO: 49 - protein, 223 aa, Cucurbita maxima
MAPVGLPPGFRFHPTDEELVNYYLKRKISGQVIELDIIPEVDLYKCEPWELSEKSFLPSRDPEWYFFGPRDRKYPNGFRTNRATRAGYWKSTGKDRRVTSHQRAIGMKKTLVYYRGRAPQGIRTDWVMHEYRLDDKDCEDSSGIQDSYALCRVFKKNGICSEVEEQLSGQSSSSSLSFIDNSNSTSQTLVNDYETLSPDVLMPSPSSSCVEEEERTIHGCSSL

SEQ ID NO: 50 - protein, 172 aa, Cucurbita maxima
MENYQMFFPCSNGGGLSAYSQLDISSGTASDMFRNFHGGDPQASGVLGLKTEVVTAAVEADRNCGGSANKKGEKKVRKPRYAFQTRSQVDILDDGYRWRKYGQKAVKNNKFPRSYYRCTHQGCNVKKQVQRLTKDEGVVVTTYEGMHTHSIDKPTDNFEQILSRMQIYSTPF

SEQ ID NO: 51 - DNA, 1938 bp, Arabidopsis thaliana
atggatactaatacatctggagaagaattattagctaaggcaagaaagccatatacaataacaaagcagcgagagcgatggactgaggatgagcatgagaggtttctagaagccttgaggctttatggaagagcttggcaacgaattgaagaacatattgggacaaagactgctgttcagatcagaagtcatgcacaaaagttcttcacaaagttggagaaagaggctgaagttaaaggcatccctgtttgccaagctttggacatagaaattccgcctcctcgtcctaaacgaaaacccaatactccttatcctcgaaagcctgggaacaacggtacatcttcctctcaagtatcatcagcaaaagatgcaaaacttgtttcatcggcctcttcttcacagttgaatcaggcgttcttggatttggaaaaaatgccgttctctgagaaaacatcaactggaaaagaaaatcaagatgagaattgctcgggtgtttctactgtgaacaagtatcccttaccaacgaaacaggtaagtggcgacattgaaacaagtaagacctcaactgtggacaacgcggttcaagatgttcccaagaagaacaaagacaaagatggtaacgatggtactactgtgcacagcatgcaaaactacccttggcatttccacgcagatattgtgaacgggaatatagcaaaatgccctcaaaatcatccctcaggtatggtatctcaagacttcatgtttcatcctatgagagaagaaactcacgggcacgcaaatcttcaagctacaacagcatctgctactactacagcttctcatcaagcgtttccagcttgtcattcacaggatgattaccgttcgtttctccagatatcatctactttctccaatcttattatgtcaactctcctacagaatcctgcagctcatgctgcagctacattcgctgcttcggtctggccttatgcgagtgtcgggaattctggtgattcatcaaccccaatgagctcttctcctccaagtataactgccattgccgctgctacagtagctgctgcaactgcttggtgggcttctcatggacttcttcctgtatgcgctccagctccaataacatgtgttccattctcaactgttgcagttccaactccagcaatgactgaaatggataccgttgaaaatactcaaccgtttgagaaacaaaacacagctctgcaagatcaaaacttggcttcgaaatctccagcttcatcatctgatgattcagatgagactggagtaaccaagctaaatgccgactcaaaaaccaatgatgataaaattgaggaggttgttgttactgccgctgtgcatgactcaaacactgcccagaagaaaaatcttgtggaccgctcatcctgtggctcaaatacaccttcagggagtgacgcagaaactgatgcattagataaaatggagaaagataaagaggatgtgaaggagacagatgagaatcagccagatgttattgagttaaataaccgtaagattaaaatgagagacaacaacagcaacaacaatgcaactactgattcgtggaaggaagtctccgaagagggtcgtatagcgtttcaggctctctttgcaagagaaagattgcctcaaagcttttcgcctcctcaagtggcagagaatgtgaatagaaaacaaagtgacacgtcaatgccattggctcctaatttcaaaagccaggattcttgtgctgcagaccaagaaggagtagtaatgatcggtgttggaacatgcaagagtcttaaaacgagacagacaggatttaagccatacaagagatgttcaatggaagtgaaagagagccaagttgggaacataaacaatcaaagtgatgaaaaagtctgcaaaaggcttcgattggaaggagaagcttctacatga

SEQ ID NO: 52 - DNA, 1725 bp, Arabidopsis thaliana
atggattccggtgacgcgacatctttgcttttgacgaaaattcgaagcttggagccagattatgctcctaagattattggaaactctccgtcttctccttcttctacctctccttggtcattcaacaactgtatcaacggtaataatgggaataacccccacatttcccctaaacacactccgatctcgaaaccctttagctctcaccaaagcaatggactttctgctacacattctggtagtgctgacgctgctggtggtgctgatttacttgatgatcagcagcttaatgattgcctttcgtttctcgacgattcttgttctaaaaccgaggatcttgtggatcctagcattcctttggattactctgtagatggtgatggtgaaacccatctgcacaggaggagtttctcttgtgatgcgtcttttgtgtccggagatgatggatttggtggtggatgcaaaccatgtgtgtattttagtagaggtttgtgcaagaatggagaaagctgcaagtttatccacggtggatatccggataatatggatggtaatggcattgtcgctgactcgcctaggaaaatggagaactttgttaggcagcacgaggagatgatgaggctgaaattggcttaccagcagcagaggttggcttctcaaatcctgggtcgggctccccagttgccatacgagaaaagaatggactttctcttgcagcagcatgctcaaagagatggtggactgccttttggtgatgaaagattttggagcagcagcccaggacggcttgagaggatggagctggcaatgcatttaggtgatcagtcaaattcggcatctagacagatttacttgacattcccagctgacagcacgtttaaggatgaggatgttgctacatatttcagcctctttggaacagtccaagatgtgcggatcccataccaacagaagcgtatgtttggctttgtttcatttgctcatcccgagacagtgaaagttgtactagctagagggaatccccatttcatttgcgactcacgggttcttgtcaaaccttacaaagaaaaaggcaaagtcttggacaagaagcaacagcaactgctacaacagcagattgagcgaggaaattactccccgtgctccagtccatctgggattgatcctagagaacagtctgatttccaccttggttcaaagatgttgtatgagagacgtgagatgatgagaaggaaaatagagcaggctgatctcctgagggctattgaactcgaaagaagacgtttcattaatttacagcttcctgagttcaagaatagtgtaacgctgaatcatcaccgtagcttttctgtggggtctcctggttatttttcatctgccggcaatcaaagccctgattttcaatctgaacttaacggtgcagatgctttaaaagtaactgatgataccttggagctgcatccttacccagtagtcaacccaatgagtgttaacaatagctactcaaacggtgcaaaagaagagactaacaagagtgaattgcttgatcccgattctggaagcaccattgagcttgttcttcctagtaacctcttcccttctgcatcatctaccgatgatcacaaaaccgatgattctgctgaaactaatgcaaaagttggagtctcctctactaatgaaaatgaccatgaaccaccagtcactaccaataatctgatgcagtag

SEQ ID NO: 53 - DNA, 1608 bp, Arabidopsis thaliana
atggtcattaccgctaacgatttatcaaaatgggaaaattttcctaaaggacttaaggttcttcttctcctcaacggctgtgacagcgacggagatggctcctcagccgccgagactcgatcagagctcgaatcaatggactatatcgttactacattcaccgatgaaactgaagcactctctgcggttgtcaagaacccggagagcttccacattgccatcgtcgaggtgaatatgagcgctgagagtgagagtttcaagtttcttgaggctgccaaagacgttcttcctactataatgatttcaaccgatcattgcatcactactacaatgaaatgcatagcgcttggtgcagttgagttcctacaaaaaccgctctcaccggagaaattaaagaacatttggcagcatgttgttcataaggcattcaatgatggtggaagtaatgtttcgatatcacttaagccagtgaaagaatccgttgtctcgatgcttcatcttgagaccgacatgacaatcgaggagaaagatccagcgccatcaacaccgcaattgaaacaagattcacggttactagacggtgattgccaagagaacataaatttctcgatggaaaatgtaaattcctcgaccgagaaagataacatggaagatcatcaagacatcggtgaatctaaatcagtcgacactacaaaccgcaaattagatgacgacaaagtggttgtcaaagaagagagaggagacagtgaaaaagaagaagaaggtgaaaccggagatctcataagcgagaagacagattcagttgatattcataagaaagaagatgagactaaaccgattaataaatcatccgggatcaagaacgtgtctggtaacaaaactagtcgaaagaaggtggattggacaccagagctgcacaagaagtttgtgcaagcagttgagcaactcggcgttgatcaagcgataccctcgcggattcttgagttgatgaaagtaggcaccttaacaagacacaatgtagctagtcaccttcagaaatttcggcagcataggaagaatattcttccaaaggatgatcataaccatagatggatacaatctagagagaaccatagaccaaatcaacgtaattataacgtttttcaacagcaacaccgtcccgtgatggcttatcccgtttggggtcttcccggtgtttatccgccaggagcgattccacctttgtggccaccgccgctgcagtccattggtcaaccacctccgtggcattggaaaccaccttatccaacggtgagcggtaatgcatggggttgtccggttggaccgcctgtgaccggatcatatattactccttcgaatactaccgccggcggatttcaatatcccaacggagctgaaaccggcttcaaaataatgccggcgagtcagccggacgaggaaatgttagatcaagtggttaaagaagcgataagcaaaccgtggctgccgctaccgctcgggctaaaaccgccgtccgcggagagcgttttggctgagctaacgcgtcaaggcatctcagccgtcccttcttcttcttgtctaatcaacggctctcatcgtctccgctga

SEQ ID NO: 54 - DNA, 2634 bp, Arabidopsis thaliana
atggtaccatcagagccgcctaatcctgttgggggtggtgaaaatgttccgccttcgatattaggaggacaaggaggagctcctcttccttctcaaccagcatttccttcacttgtctctccgcgtactcagtttggtaacaatatgagtatgagtatgcttgggaatgctccaaatatatcttctcttctcaataatcagtcttttgtaaatggtatccctggttctatgatttctatggatacaagtggtgctgagtctgacccgatgtctaacgtcgggtttagtggtttgtcgtcttttaatgcgtcgagtatggtgtctccgcgctcatcaggtcaagttcagggtcagcagttttcgaatgtttcggctaaccagttgttggctgagcaacaacggaataagaaaatggagacgcagagttttcaacatggtcagcagcagtcaatgcagcagcagttttcgacagtgcgtggtggtggattagcaggtgtgggacctgttaagatggagcctggtcaggtttcgaatgatcagcagcatggtcaagtacaacagcagcaacagaaaatgttgagaaacctagggtcagttaagttggaaccgcagcaaattcaggccatgagaaatttggcccaagtgaaaatggaacctcaacattctgagcagtcattgtttctccaacaacagcagaggcaacaacagcaacaacaacaacaacaatttcttcaaatgccggggcaatctccgcaggctcaaatgaacatatttcagcagcagagacttatgcaacttcaacaacagcaactcttgaaatctatgcctcaacagcgtcctcaattaccacagcagttccaacagcagaatttacctctaaggccacctctgaaaccagtgtatgaacctggcatgggtgctcagcgtcttacacagtatatgtacagacaacaacataggcctgaagacaataatatcgagttctggagaaaatttgtagctgagtactttgctcctaatgccaaaaagagatggtgcgtctctatgtatggcagtggcaggcaaacaacaggcgttttccctcaggatgtgtggcactgtgagatatgtaaccgaaagcctggacgtggttttgaggcaaccgccgaagtccttccgcggctgtttaagattaagtatgagagtgggacgttagaagaactgttatatgtagatatgccaagggagtcccagaattcatctggccaaattgtcctggagtatgcaaaagcaacacaagagagtgtctttgagcatcttcgggttgttcgtgatggccaacttcgaatagtcttctcgccagatcttaagatattctcctgggaattttgtgctcggcggcatgaagagcttattccacgaagacttttgataccgcaggttagtcagcttggatcggcagctcagaaatatcaacaagctgctcaaaatgcaacaacagattctgctcttccggagctacaaaataattgcaatatgtttgttgcatctgctagacaattggcaaaggccctggaagtaccacttgtgaatgatttgggatacacaaagagatatgttcggtgtttgcagatctcagaggtggtaaatagtatgaaggacctgatagattatagcagagaaacacgaacaggaccaatcgagagtttagccaagtttcctcggagaacaggcccttcatctgcactgcctggtccttctcctcagcaagccagcgaccagcttaggcagcagcagcaacaacaacagcagcagcagcaacagcaacaacaacaacaacaacaacagcagcagcagcaaacagtttcccagaatacaaacagtgatcaaagtagtaggcaagttgcactaatgcagggtaatccaagcaatggtgtaaattatgcctttaatgcagcctctgcatccacttccaccagcagcatcgcagggctcatccaccagaattcaatgaagggaagacatcagaatgctgcttacaatcctccaaacagcccctatggaggaaactctgttcagatgcaatcacctagttcctcgggtaccatggtgccatcatcatcgcagcaacaacacaacctgccaacatttcagtctccaacatcctcatctaataacaataatccctctcaaaacgggataccatctgttaatcacatgggttccacaaactcaccagcaatgcaacaggcaggtgaggttgatggaaacgagtctagctcggtgcagaagatactgaatgaaatcctgatgaacaaccaagctcataataatagctcaggaggaagcatggttgggcatgggtctttcgggaatgatgggaagggtcaagctaatgtaaatagttctggtgttttactgatgaatggccaagtgaacaacaacaacaacacaaatattggaggtgctggtgggtttggtggtgggattggtcaatccatggcagcaaacggaatcaataatataaacggtaacaatagtctcatgaacggaagagttgggatgatggtgcgggatccaaacggtcaacaggatttaggaaaccaacttttaggagcagtgaatggtttcaacaattttgattggaacgcgtga

SEQ ID NO: 55 - DNA, 1080 bp, Arabidopsis thaliana
atgatgatcggagaatctcatcgtggttttaatccaacggttcatattcctccatggccactttctgaagatctaacggtgtctgatatttacggaagtccagacggaggaagtagtatgatggaagctttggctgagttacaacgttatcttccgtcaaacgaaccggatccggattcagatccggatctctcgggtccggattcaccaatcgatgcttatacatgcgatcattttcggatgtatgagtttaaagtgagacgttgtgctcgtggccggagccatgattggacggagtgtccttacgctcatcccggagaaaaagctcgccgtcgtgatccgaggaagtttcattactccggtacggcgtgtcctgagtttcgtaaaggttgttgcaagagaggagacgcatgtgagttttctcatggtgtttttgagtgttggcttcacccggcgcgttaccggactcagccgtgtaaagacggtggtaactgtcgccgtcgtgtttgtttctttgctcattcgccggatcagattagggttttgcctaatcaaagccctgatcgtgttgattcgttcgacgttttgtctcctacgattcgtagagcgtttcagttttcgatttctccgtcgtctaactcgccgccggtgagtccacgaggtgactcggactcgtcgtgttcgttactgagtcgttcactcgggtctaatctgggaaacgacgtcgttgcgtctctcaggaatctgcaacttaataaagtgaagtcttctctttcgtcgtcatacaacaatcaaatcggaggatacggatccggattcgggtcgcctcgtggatcggttttgggtcctggtttccgtagcttaccaactacaccgacccgacctggttttatgaacatttgggagaatggcttggaggaagaaccggcgatggaacgggtcgagtcgggtcgtgaactgcgagcgcagctgttcgagaagctgagcaaagagaattgcatgggtcggattgaaccggatccggatcagggagcgggtgatactcctgatgtcgggtgggtctctgacttggttatgtga

SEQ ID NO: 56 - DNA, 789 bp, Arabidopsis thaliana
atgtgcggaggagctgtaatttccgattacatagcgccggagaagattgcgagatcatctggaaagtcttcctggagaagtaatggcgtctttgactgctcaatctacgatttcgatggaaatttcgatgaattagagtccgatgagccatttgtcttctcctctactcacaaacatcatgcttcaggctcagcatcagatgggaagaagaaacagagcagtcggtacaaaggaatcagaagaaggccttggggaagatgggcggctgagatacgtgatccaatcaaaggagttcgagtttggctcgggactttcaacacagctgaagaagctgcaagagcttatgatcttgaagctaagagaatccgtggagccaaagctaagctcaatttccctaacgaatcctctggaaagaggaaagccaaggctaagactgtgcaacaggtagaggagaatcatgaggctgatcttgatgtggcggtggtaagctcagcgcctagtagtagctgtcttgatttcttgtgggaggagaataatccggacacgcttctgattgatacacaatggctcgaagatatcatcatgggcgatgcgaataagaaacatgaacctaatgatagtgaagaagccaacaacgttgatgcttctctgctttctgaagagcttcttgcttttgagaaccagaccgaatatttctcgcagatgccttttacggagggaaactgtgattcctcaacgtctctgagtagtctctttgatggaggcaatgacatgggtctatggtcctga

SEQ ID NO: 57 - DNA, 1914 bp, Arabidopsis thaliana
atgacgacggagcaagctttgttgtctatggaagctttacctttaggtttcagattcagaccaacggatgaagaactcatcaatcattacctaaggttaaaaatcaacggccgtgatttagaggttagagtcatccctgagatcgatgtttgcaagtgggaaccatgggacttacctgggctatcggtgataaagacagatgatcaagaatggttctttttttgtcctcgtgatcgaaagtatccgagtggtcatcgttctaatagagctactgatattggttactggaaagctactgggaaagatcgaactattaagtctaagaagatgattattggtatgaagaagactcttgttttctatcgtggaagagctcctagaggagagcgtactaattggattatgcatgagtatcgtgctacagacaaggaactagatggtactggacctggtcagaatccgtatgttttgtgtcgcttgttccacaagcctagtgatagttgtgatcctgcacactgtgaggaaatagagaaagttaattttactccaaccaccaccactagatgctctcctgatgacacatcttctgaaatggtccaagaaacagctacatctggtgtacatgctctagatagatcagatgacactgagaggtgtttaagtgacaagggcaataatgatgtgaaacctgatgtttcagtgataaacaatacttctgtcaatcacgctgaaacttctcgtgccaaagaccgtaatttgggcaagacgttagtagaggaaaatccacttctaagggacgttccaactcttcatggacccatcttgagtgagaaatcatattatccaggacagtcaagcatcggttttgctacatctcacatggattctatgtattctagtgattttggaaactgtgattatgggctacattttcaagatggtgcctctgaacaagatgcatctttaacagatgtcttggatgaagtattccataaccataatgaatcctctaatgacaggaaagactttgtacttccgaatatgatgcattggcctggtaatacaagactgttgtctactgagtacccatttctcaaagattctgttgcttttgttgacggcagtgctgaagtttccggctcacagcaatttgttcctgacattttagcttctagatgggtcagtgaacagaacgttgatagcaaggaggcagtagagattctatcttcaaccgggtcctctcggaccttgacgccacttcataacaacgtttttgggcaatatgcttcatcgtcttacgcagctatcgatccatttaactataatgtcaatcagcctgaacagtcatcctttgagcaaagccatgttgaccgcaacattagtcccagtaacatttttgagttcaaggctaggtctcgagagaatcagagagatctggactctgttgtggaccaaggcactgctcctagaagaattcggctgcagatcgaacagccattgacgccagttaccaacaagaaagagagagatgcggacaactatgaagaagaagatgaagtacaatctgccatgtccaaggtcgtagaggaagaaccggctaatttaagtgctcaggggactgctcagaggagaatccgcctgcagacgagattgaggaagcctctcataaccctaaacaatacaaaaagaaactcaaatggcagagaaggagaagcaagccataggaaggaaaaagaagatatatcatcatcatcatcatggcagaaacagaagaagagcttggtgcagtttagtagtgtggtgataatagtggcggtgatagttgttttagtagaaatatggaaagagtcaagagatgcgaaatgtagcttcttgtttcatcaattagattccttcaaaggcatgtttacttga

SEQ ID NO: 58 - DNA, 1365 bp, Arabidopsis thaliana
atggggtctagattaaacttcaagagctttgttgatggtgtgagtgagcagcagccaacggtggggactagtcttccattgactaggcagaactctgtgttctcgttaacctttgatgagtttcagaactcatggggtggtggaattgggaaagattttgggtctatgaacatggatgagctcttgaagaacatttggactgcagaggaaagtcattcaatgatgggaaacaataccagttacaccaacatcagcaatggtaatagtggaaacactgttattaacggcggtggtaacaacattggtgggttagctgttggtgtgggaggagaaagtggtggttttttcactggtgggagtttgcagagacaaggttcacttaccttgcctcggacgattagtcagaaaagggttgatgatgtctggaaggagctgatgaaggaggatgacattggaaatggtgttgttaatggtgggacaagcggaattccgcagaggcaacaaacgctgggagagatgactttggaggagtttttggtcagggctggtgtggttagggaagaacctcaaccggtggagagtgtaactaacttcaatggcggattctatggatttggcagtaatggaggtcttgggacagctagtaatgggtttgttgcaaaccaacctcaagatttgtcaggaaatggagtagcggtgagacaggatctgctgactgctcaaactcagccactacagatgcagcagccacagatggtgcagcagccacagatggtgcagcagccgcaacaactgatacagacgcaggagaggccttttcccaaacagaccactatagcattttccaacactgttgatgtggttaaccgttctcaacctgcaacacagtgccaggaagtgaagccttcaatacttggaattcataaccatcctatgaacaacaatctactgcaagctgtcgattttaaaacaggagtaacggttgcagcagtatctcctggaagccagatgtcacctgatctgactccaaagagcgccctggatgcatctttgtcccctgttccttacatgtttgggcgagtgagaaaaacaggtgcagttctggagaaagtgattgagagaaggcaaaaaaggatgataaagaatagggaatcagctgcaagatcccgcgctcgcaagcaagcttatacgatggaactggaagcagaaattgcgcaactcaaagaattgaatgaagagttgcagaagaaacaagttgaaatcatggaaaagcagaaaaatcagcttctggagcctctgcgccagccatggggaatgggatgcaaaaggcaatgcttgcgaaggacattgacgggtccctggtag

SEQ ID NO: 59 - DNA, 1794 bp, Arabidopsis thaliana
atgtgcggtgcaaagagcaacctttgctcatctaaaaccctaacagaagtcgaattcatgaggcagaaatcagaagacggagcttccgccacgtgtctcctcgaattcgccgcctgtgatgatctttcatcgtttaagagagagatcgaagagaatccatcggtggagattgatgagtcagggttttggtattgcagacgggtcgggtctaagaagatgggttttgaagaaagaacaccacttatggttgctgctatgtatggaagcatggaagtgttgaattacataattgccacaggaagatccgatgtgaacagagtttgcagtgacgagaaagtcactgctcttcactgtgcagtttctggctgttctgtttctatcgttgagatcatcaagatcttgcttgatgcttctgcttcacctaattgtgttgacgctaatgggaacaaaccggttgatttgttggctaaagattctcggtttgttcctaaccagagtagaaaggcggttgaggttttactgaccgggattcatggttcggttatggaagaagaggaggaggaactgaagagtgttgtgactaagtatccagctgatgcatcacttcctgatattaacgaaggtgtttatggaactgatgattttaggatgtttagctttaaggttaagccatgttctagggcttattcacatgattggactgaatgtccttttgttcatcctggtgagaatgcaaggaggagagatcctaggaagtatccttacacttgtgtgccttgtcccgagtttcgtaaagggtcttgtcctaaaggagattcgtgtgagtacgcgcacggtgttttcgagtcttggcttcacccggcgcagtataggacacggctttgcaaagatgagactggttgtgctaggagagtttgtttctttgctcatagacgggatgagttaagaccggttaatgcttctactggttctgcaatggtttcaccaaggtcgtctaatcagtctcctgagatgtctgttatgtctcctttgacgctgggatcatcgccaatgaactctcctatggctaatggtgttcctttgtctccaagaaatggtggtttatggcagaacagagttaatagccttacaccaccaccgttgcagcttaatggtagcagattgaagtcgactttgagtgctagagatatggatatggagatggaacttaggtttcgcggtttggataaccggagacttggtgatctcaagccatccaacctcgaagagactttcggatcatatgactcagcttctgtgatgcaacttcaatcaccaagcaggcattctcagatgaaccactatccgtcttcacctgtgaggcagcctcctcctcatggattcgaatcttcagcagccatggcagctgcagtgatgaatgcaagatcctcagcgtttgcgaaacgcagcttgagtttcaaaccagctccagtagcttctaatgtctccgattggggatcaccaaatgggaagcttgagtggggaatgcaaagagatgagctgaacaagttgaggagaagtgcctccttcggcattcatggaaacaacaacaacagtgtgtcacgccctgctagagactacagtgacgagccagatgtgtcgtgggtgaactcactggtgaaagagaatgcaccagagagagtgaatgagagggttgggaatacggtgaatggtgcagcgagtagagacaagtttaagctgccgtcgtgggcagagcaaatgtatatagaccatgagcagcagattgtggcataa

SEQ ID NO: 60 - DNA, 669 bp, Arabidopsis thaliana
atggccaagatgggcttgaaacccgacccggctactactaaccagacccacaataatgccaaggagattcgttacagaggcgttaggaagcgtccttggggccgttatgccgccgagatccgagatccgggcaagaaaacccgcgtctggcttggcactttcgatacggctgaagaggcggcgcgtgcttacgatacggcggcgcgtgattttcgtggtgctaaggctaagaccaatttcccaacttttctcgagctgagtgaccagaaggtccctaccggtttcgcgcgtagccctagccagagcagcacgctcgactgtgcttctcctccgacgttagttgtgccttcagcgacggctgggaatgttcccccgcagctcgagcttagtctcggcggaggaggcggcggctcgtgttatcagatcccgatgtcgcgtcctgtctactttttggacctgatggggatcggtaacgtaggtcgtggtcagcctcctcctgtgacatcggcgtttagatcgccggtggtgcatgttgcgacgaagatggcttgtggtgcccaaagcgactctgattcgtcatcggtcgttgatttcgaaggtgggatggagaagagatctcagctgttagatctagatcttaatttgcctcctccatcggaacaggcctga

SEQ ID NO: 61 - DNA, 1917 bp, Arabidopsis thaliana
atggcaaatcgcggaggtgaatatctgtacgatgagttatggaaattatgcgcgggacctcttgttgatgttcctcaagctcaagaaagagtttattattttcctcaaggtcacatggaacaactcgaagcgtcaacgcaacaagtcgacttaaatacgatgaagcctctttttgttcttcctcctaagattctctgcaatgttatgaacgttagtcttcaggcggagaaagatacggatgaggtctatgctcagattactttgatccctgttggaactgaagttgatgaacctatgagtcctgatccctctcctcctgagttgcaaaggccgaaagttcactctttcagcaaggttttgacagcgtctgatacaagcacccatggtggcttttctgttctaaggaaacatgccacggaatgtcttcctccgctggatatgactcagcaaaccccgacccaggagttagtagccgaagatgtgcacggttatcagtggaaattcaagcatatttttagaggccaaccacggaggcatctattgacgacagggtggagcacctttgttacatcaaagagattggttgctggggacacctttgtattcctgagaggggagaacggagagttgcgagttggagtcagacgtgctaatcttcaacagagcagtatgccttcatccgttatatcaagtcatagtatgcatctgggagtgcttgctactgcacgccatgctactcaaacgaaaactatgttcattgtatactataaaccaaggacaagccaattcatcattagcttgaacaaatatctagaagccatgagcaataagttctctgtagggatgagatttaagatgcgttttgagggagaggattcccctgaaagaagatattctggcacggttattggtgtgaaagactgctcccctcactggaaagactcaaaatggcgatgcttagaagttcattgggatgagcctgcatcgatttcaagacccaataaggtttcaccatgggaaattgaaccgtttgtaaattcagaaaacgttcccaaatcagttatgctgaagaacaaaaggccccgtcaagttagtgaagtatctgcacttgatgtaggcataacagcttcaaacctttggagctctgttttgacgcaaccccatgagtttgcacaatcgtgcatcacctcacagtggagttctcctcagcaatgtcatcgtgatgcaaatgaggatgctaagaaatctgactggctaaataactcttactctgtgtcaaatgtagcaaaagactcaacactgaacgaccaaatggtttccccagtcgagcagaagaagcctgagacaaccgctaattatagattatttggaattgatctgatgagttcctccctagcggttcctgaggagaaaactgcacccatgcgaccaatcaacatatccaaaccgactatggacagccactcagacccaaaatcagagatttcaaaagtatcagaagagaaaaagcaggaacctgcggagggatcaccaaaagaggtccaaagcaagcaaagcagttctacaagaagccgtaccaaggtgcagatgcaaggcgtacctgtgggcagggctgtggatttaaatgcgctaaaggggtacaacgagctcatagatgacattgagaagctgtttgacataaaaggggaactgcggagtcgcaatcaatgggaaatagtgttcacagacgatgagggagatatgatgcttgtcggtgatgacccatggcctgagttctgcaacatggtgaagagaatattcatatggtcgaaagaggaagtgaagaaaatgacgcctgggaaccaactccggatgctgttaagggaagttgaaacaacactaacaacaacttccaaaacagataatcattccaactaa

SEQ ID NO: 62 - DNA, 732 bp, Arabidopsis thaliana
atgatcggccaacttatgaacctcaaggccacggagctctgtctcggcctccccggcggcgctgaagcagttgagagtcctgccaaatcggcggtgggaagcaagagaggcttctccgaaaccgttgatctcatgctcaatcttcaatctaacaaagaaggctccgttgatctcaaaaacgtttctgctgttcccaaggagaagactacccttaaagatccttctaagcctcctgctaaagcacaagtggtgggatggccacctgtgaggaactacaggaagaacatgatgactcagcagaagaccagtagtggtgcggaggaggccagcagtgagaaggccgggaactttggtggaggagcagccggagccggcttggtgaaggtctccatggacggtgctccatatctgaggaaagttgacctcaagatgtacaaaagctaccaggatctttctgatgcattggccaaaatgttcagctcctttactatgggaaactatggagcacaaggaatgatagatttcatgaacgagagcaagctaatgaatctgctgaatagctctgagtatgtgccaagctacgaggacaaagatggtgactggatgctcgttggcgatgtcccatgggaaatgtttgtcgagtcttgcaaacgtttgcgcattatgaagggatctgaagcagttggacttgctccgagagcaatggagaagtactgcaagaacagatcttga

SEQ ID NO: 63 - DNA, 1863 bp, Arabidopsis thaliana
atggcattgtctctgctccggaagaacaaacatggattcgatatagtaatcagtgatgttcatatgcctgacatggacggtttcaagcttcttgagcatgttggtctagagatggacttacctgttatcatgatgtctgcggatgattcaaagagtgtggttctaaagggagtaacgcacggtgcggttgattaccttatcaagcctgtacgtatggaggcacttaagaacatatggcagcatgtagttaggaagaggagaagtgaatggagtgtaccggaacattctgggagcattgaggagactggcgagagacagcagcagcaacatagaggaggtggtggtggtgcagctgtttctggtggagaggatgcggtggatgataactcatcctcggttaacgaaggtaacaattggaggagcagttcacggaagaggaaagacgaggaaggagaagagcaaggagatgataaggacgaagatgcgtcgaatttgaagaaaccgcgtgtcgtctggtctgttgaattgcatcagcagtttgttgctgctgttaatcagctcggcgttgagaaggcggttcctaaaaagatcttagagctgatgaatgttcctggtctaacccgagaaaacgtagcaagtcacctccagaaataccggatatatctaagacggcttggaggggtatcgcagcaccaaggcaatcttaacaactcgtttatgacgggtcaggatgcgagcttcggacctctttcgacattgaatgggtttgatcttcaagcactagccgtcacaggtcagttacctgcacagagtcttgcacagcttcaagccgctggtttaggccggcctgcgatggtctctaagtcaggtttgccggtttcctccattgtggatgagagaagcatcttcagctttgacaacacgaaaacaagatttggagaagggcttgggcatcacgggcaacaaccccaacagcaaccacagatgaacttacttcacggtgtccccacgggtttacaacagcagcttcctatgggtaatcgaatgagtattcaacaacagattgctgctgttcgagctggaaatagtgttcaaaacaacggaatgctgatgcctctagcgggtcagcagtctttgcctcggggaccaccgcctatgctaacctcttcgcaatcatccatcaggcagccgatgttatcaaaccgcatttccgagagaagtggtttctctggaaggaacaatatccccgagagcagcagagtgttaccgacaagttacactaatctcacaacacaacactcatcaagctcgatgccttataacaacttccaaccagaacttcccgtgaacagtttcccgctggcaagtgcaccagggatatcagtaccggttcggaaagccacttcttaccaggaagaggttaacagctccgaagcgggtttcactacgccgagctacgacatgttcaccaccagacagaatgattgggatctgaggaatattggaatagcctttgactcacatcaggactcagaatccgctgcgttttccgcttcagaagcctactcttcttcgtccatgtcaagacacaacacgacagttgcagccaccgagcatggccgaaaccaccagcagccaccatcgggaatggtacagcaccatcaggtttatgcagacggaaacggtggttcagtgagggtgaaatcagagagagtggctacggatacagcaacaatggcgtttcacgagcagtatagtaatcaagaagatcttatgagcgcacttcttaagcaggaagggattgcaccggttgatggcgaattcgactttgacgcatactccatcgataacattccggtttga

SEQ ID NO: 64 - DNA, 1038 bp, Arabidopsis thaliana
atggaagaactgaaagtggaaatggaggaagaaacggtgacgtttactggttctgtagcggcttcttcatctgtaggatcctcttcctctcctagaccaatggaagggcttaacgaaacagggccaccaccgtttctgactaagacttacgaaatggtggaagatccggcgacggacacggtggtttcttggagtaatggtcgtaacagctttgtggtgtgggattctcataagttctcaacaactctccttccacgttacttcaagcatagcaatttctcaagttttattcgtcagctcaatacttatggattcagaaagattgatccagatagatgggaatttgcaaatgaagggtttttagcaggacaaaagcatctcttgaagaacatcaaaagaaggaggaacatgggtttgcagaatgtgaatcagcaaggatctgggatgtcatgtgttgaggttgggcaatacggtttcgacggggaggttgagaggttgaagagggatcatggtgtgcttgtagctgaggtagttaggttgaggcaacagcaacacagctccaagagtcaagttgcagctatggagcaacggttgcttgttactgagaagagacagcagcagatgatgacgttccttgccaaggcgttgaacaatccgaactttgttcagcagtttgcggttatgagtaaagagaagaagagtttgtttggtttggatgtggggaggaaacggaggcttacttctactccaagcttggggactatggaggagaatttgttacatgatcaagagtttgatagaatgaaggatgatatggaaatgttgttcgctgcagcaatcgatgatgaggcgaataattcgatgcctactaaggaggaacaatgtttggaggctatgaatgtgatgatgagagatggtaatttggaagcagcgttggatgtgaaagtggaagatttggttggttcgcctttggattgggacagccaagatctacatgacatggttgatcaaatgggttttcttggttcggaaccttaa

SEQ ID NO: 65 - DNA, 2064 bp, Arabidopsis thaliana
atggctggttttgatgaaaatgttgctgtgatgggagaatgggtgcctcgtagtcctagtcccgggacacttttctcctctgctattggagaagagaagagctcgaaacgtgttcttgaaagagagttatctttgaatcatggtcaagttattggtttagaagaagacactagtagtaatcataacaaggattcttcacaaagcaatgtttttcgaggtggtctcagtgaaagaattgctgcaagagctggatttaatgctccaaggttgaacactgagaatatccgcaccaacaccgacttttccattgactctaaccttcgatctccttgcttaaccatctcttctcctggccttagccctgcaacactcttggaatctcctgttttcctttctaacccattggctcaaccttctccaactaccgggaaatttccatttcttcctggtgttaatggtaatgcattgtcttctgagaaagcgaaagacgagttctttgatgatattggagcatcattcagcttccatcctgtttcaagatcatcttcctctttcttccaaggcacaacagagatgatgtcagttgattatggtaactacaacaatagatcttcttctcatcaatccgcagaagaagtaaaacctggctctgaaaacatagaaagctccaatctttatgggattgaaactgacaatcaaaacgggcagaacaagacatctgatgtcactacaaacaccagtcttgaaaccgtggatcatcaagaggaagaagaagagcaaagacgcggtgattcgatggctggtggtgcgcctgcagaggatggatataactggaggaaatacggacaaaagttggtcaaaggaagtgagtatccgcgaagctattacaagtgcacaaacccgaattgtcaggtgaagaagaaagttgagagatcaagggaaggtcacatcacagagattatatacaaaggagctcataatcatcttaaacctccacctaatcgccgctcagggatgcaagtagatggaactgaacaagttgaacaacaacaacaacagagagattctgctgcaacgtgggttagttgtaataacactcaacaacaaggtggaagcaatgagaacaatgtcgaagagggatctacgagattcgagtatggaaaccaatctggatcaattcaagctcaaaccggaggtcaatacgagtcaggtgatcctgtggttgtggttgatgcttcttcaacattctctaatgatgaagatgaagatgatcgagggacacatggaagtgtttctttgggttacgatggaggaggaggaggtgggggaggagaaggagatgaatcagagtcgaaaagaaggaaactagaagcttttgcagcagagatgagtggatcaacaagagccatacgtgagccaagagttgttgtgcagacaacgagtgatgttgacattcttgatgatggttatcgctggcgaaaatatggtcagaaagttgtcaaaggcaatccaaatccaaggagttattacaaatgcacagctccaggatgtacagtgaggaaacatgttgaaagagcttctcatgatctcaaatccgttataacaacttacgaaggcaaacataaccatgacgtccccgctgcacgcaacagcagccacggaggcggtggtgatagtggtaacggtaacagcggcggttcagccgcagtttctcaccattaccacaacggtcatcactcagagccgccacgtgggagattcgacagacaagtcacaactaacaatcagtctccttttagccgtccctttagctttcagccacatttgggtcctccttctggtttctccttcggtttaggacaaaccggtttggttaatctttcaatgcctggtttagcgtatggtcaagggaaaatgccgggtttgcctcacccgtatatgacacaaccggttgggatgagtgaagcaatgatgcagagagggatggaaccaaaggttgaaccggtttcagattcaggacaatcggtatataaccagatcatgagtagattacctcagatttga

SEQ ID NO: 66 - DNA, 1014 bp, Arabidopsis thaliana
atggagaaatcagatcctccaccagtcccaaagcccggcgccactattatcccctcctccgatccaattcctaatgccgatccgattccatcttcttccttccaccgccgatctcgctccgacgatatgtccatgttcatgttcatggatcccctctcctccgccgcaccaccttcctccgacgaccttccctccgacgacgatctcttctcttctttcatcgatgtcgatagcctcacctctaatcccaatccctttcaaaatccttccctctcctccaactccgtttccggcgctgctaatcctcctcctcctccttcctctcgtcctcgccaccgtcacagcaattccgttgacgctggatgcgccatgtatgccggtgatatcatggacgctaagaaagctatgcctcctgaaaaactctctgagctttggaacatcgatcccaaacgcgccaaaaggattctagcgaatcgacaatctgcagctcgatccaaagagagaaaagctcgatacattcaagaacttgagcgcaaagttcaatctcttcaaaccgaagctaccactctctctgctcagcttactctctaccagagagacacaaatggactagcaaacgaaaacacagagctgaaacttaggttgcaagcaatggaacaacaagctcagcttcgtaatgctttaaacgaagcgttgaggaaagaagttgaaaggatgaagatggagacaggagaaatctctggtaattcagattcgtttgatatgggaatgcagcagattcagtattcttcctcaactttcatggctattccaccatatcatggctcaatgaacctccatgatatgcagatgcattctagtttcaatcctatggagatgtccaattctcaaagcgtgtcggactttctacagaacggccgaatgcaagggctggagattagtagcaatagctcaagcttagtcaaatctgaaggaccttctctctctgctagtgagagtagctctgcctattga

SEQ ID NO: 67 - DNA, 948 bp, Arabidopsis thaliana
atgacgtcgtttcaggtgatgcgttcttcaaattcgagaaactcggatctatctcgtcgcatctcttctgcttctacttcttcttcgtctataagacctcaacaacagttccggcgagatctaacaagtgtcggttacggcggaagaaacgacggattatacagttcaaattcgatgacggtcgaagggattttacacgatactttcgcatcagatccaccagcaccaacggaatcttcactcttagatgcgtcgataaatctgatggatgcttctccagcaccaatggagataacaacaacgacggcttctgatgttgtggatcacggcggaggaacggagacgacgcgtggtgggaagagtgttgatgagatttggagagagatggtatcaggagaaggtaaagggatgaaggaagagacgtcggaagagataatgacgttagaggattttctagcgaaagctgcggtggaagacgaaacagcggtgacggcgtcggcggaggatttggatgtgaagattccggtgacgaattacggattcgatcattctgcaccgccgcataatccgtttcagatgattgataaagtagaaggatcaatagttgcgtttgggaatggtttagatgtttacggaggaggagctagagggaagagagcgagagtgatggttgagccattggataaagcagctgcacagagacagagaaggatgattaagaatcgtgaatctgcagctaggtctagagagaggaaacaagcttatcaagttgagttagaagctttggctgcgaagcttgaggaagagaatgagttgctttctaaggagattgaagataagaggaaagagagataccagaagttgatggagtttgtgattcctgttgttgagaaaccgaagcagcagccaccacggtttttacgcaggattcggtctttggaatggtga

SEQ ID NO: 68 - DNA, 3552 bp, Arabidopsis thaliana
atggggacagagctaatgagaatctgtgtgaaagaagatagtgatgatttgccatctgttcctcctggttttgaatcatatgcaacttttaccttaaaaagagtagtccctgctactacttctgataaagccaagactcctgcaattgaaagtgtttctgcaaccgaacaagctaagatggaagttgaatctgatgaagccaaagctgctcgggctctacgccgtagaccttggattaatcatagcggatgtgatgatgatggtgattgtgctgcaaacaatgacaatgctgcatctcaaaatcctgatcaaaattgtgatgtgaagccagctcttccaaagggtgtggtcaggggatgtgaagaatgtaaagattgtcagaaggagtttgaagacactttaaattatatcgctaaaataagaccggaggctgaaaagtatggaatctgtcgcattgttcctcctccttcctggaaaccgccgtgcccactgaaagaaaagcaagtatgggagggttctaaatttacaacacgtgtccaaagagttgataaacttcagaatcggagttcaatgaagaagatttcaaagcttcctaatcaaatgagaaagaagaaaagaaagtgcatgaaaatgggaatggattctgtcactaatggtatgggcgatccctgttctgcaagcactggaatgaatgaacttgagacgtttgggtttgaacctggtccagggttcacactaaaagacttccaaaaatatgctgatgagttcaaggctcagtactttaaaaagagtgaaacttctacagacgataaatgtaaagttgataattcaatagactgctgggagccagcacttgaggatgttgaaggtgaatattggcggatagtagataaagcaactgaagagatagaggtgctatatggtgctgaccttgaaactggggtatttggtagcggattccccaagatatcatcaagtcacaatgcttcttcttcagaagataaatatgcaaaatcaggctggaacttaaataactttccaaggcttccgggatccctccttaagtacgagggcagtgatatttccggtgtccttgtgccgtggctgtatattgggatgtgcttttcttctttctgctggcatgttgaagatcaccacttgtattcgttgaattatatgcactggggtgcaccgaaattgtggtatggtgttggggggaaggatgctgttaaactcgaggaggcaatgaggaagcatttgcctgacctttttgaagaacagcctgacttacttcataagctagttacacaactctccccgtcaaaactgaaaaccgcaggagtacctgtgcaccgttgcgtccagcatgctggagagtttgtcttgacttttcctcgggcatatcatgctggatttaattctggtttcaactgtgctgaagctgtgaatgtagcacccgttgactggttacctcatgggcagattgccatagagttatactgtcaacagggtagaaaaacgtccatctcgcatgataaattgttgcttggggcagcaagggaagtagtgaaagccgactgggagctgaacttactaaggaaaaatactgtagataacttaaggtggaaagcattcagtgcgaaggatggaattttggcaaaaacattaaaggcacgcattgacatggaacgtacgagaagagaatttctgtgcaactcttcacttgcattgaaaatgcacagtaatttcgatgctaccaacgagagagagtgctgtatatgcttctttgatttgcacctgtctgctgctggctgtcgttgttccccggagaagtattcatgtttgactcatgtgaaggagttgtgttcatgtccatgggttactaaatattttctatttcgctatgatatcgatgaactgaatgttcttgttgaggcagtggaaggaaaactgagttctgtatatagatgggcgcgtcaagatttaggattggcattaagtacagacgtctcaggaagcaagatggagatagatgaagaaggaaaagtccacaaggacccgactccacaaacaactgcactttcagggaaggatttgcagttgaaagtaacatcgaaagaagtaagtaaagagttagaaaagactagtaaattatctcatgttaatttacttctgaaagaaaaggaggagcaaataacgtcaagtcactgtatgaagcctgtcaaagaagaaactgtttgtgattcttctgatccaaacgtttcagcttgccaaccatctgaaggaggcataatctgtatgacagctgttaagtccgcaagtggtaaaaagaattcacagagtctacccaatgatgtgatactcctcagcgatgatgagtatgacatacctaggaaacgaggttctgtgagaagagatgcaatttcttctggcaagaaattagaaatacgagagagaccgacccacgttttggcgttagaagcttctgccaaaattgctgctccaatttgccaaagggaaggagattcgctgcgtgatacacgaaacactatatcattgcctactaatgaccaaaaaacaatgagaagggatgtaccgagttctacttcgcacgcggaagttaatgcggaggctactgggcttactcaagatatatgtaacagaatggcaactaacagccacggtggtggaaaacctactagttgtaaatccaaaaactctggaggtttggctatagtggatgttgtggatgggacaagaagtagttcaggtacaccgtcttgttcgcaaaataatagtccggataggttcatccgccaaaagggtccccgcattgcaaaggtcgtgaggagaatcaattgcaatgtagagcctttaagttatggatgtgtgctgtctggaaaatcatggtgcagccggcgagcaatttttcctaaaggatttcgtagccgggttaagtacataaacattttggatccaacaaatatgtgcttctacatttcagaaattctggatgctggacgcaacagtccattgttcatggtttacttggagagtaatcccagtgaggtgttcgttcatatgtcgcctacaagatgctgggagatggtaagagagagagtaaatcaagagataactaagcagcacaaagctggaaaatcagatcttcctcctttgcaaccctctgggagtcccgacggttttgaaatgtttggatattcgtcacccgcaatcgtacaggctatcgaagcattagacgtgaatcgagtttgcacagactattgggattccaggccttattcccggccacaagttcagttccctgcaaatcctcttctcagagaagccaacacaagtggcagatcgaatgtgggaaatctccagctaaaccctggacaccatatatcgcctactggaataaattctattcttaaagttctgttcaagaaagctagcatggaggaactaagctcacttcaagaggttttaagtgagactaactcagatatggtgaccgaacttgtgaaggaagagatccagaaccgtcgctga

SEQ ID NO: 69 - DNA, 2652 bp, Arabidopsis thaliana
atggattctggagttaaattggagcatatgaattgtttccaattatcttatcaatattcgtggacgactaggaagaagagaactctgaaaccattcatgtcaaaaggttctagccctagtagtagtagtgatagtaggaaacggaagctttcgagagctgaagatagcgatgattcagcggttaaacggaatgcgaaacgaaggagaaagatatgcaaagtagaagaatattatgaagatgatgattgcatattaagtgattgggttcagaggaatactgcgaaaaggattgataagcgcaacgaagaagttgaagttatggttaagatagagtcaggtgatgattgcacaataggtaagtggttttctgatgttagtagtaaaaggaaagataaacgacaagtagaagttgatgaagatgaggaatgggaagaagaagttacactgtgttctaagatcaaggcaacgtcgtcgcgaagcagaacccatagtttaagtgctaacagtccagaaaatgttacagatgttattagtccttgtcgttcacggtctccagcttctaatgtatcagattccattcagaaaaatgactgcaccagtagtagaaaacagagtggcccaatttgtcatcagtgcttgaaaggggaaaggataacacttctcatttgtagtgaatgtgagaagacaatgttttgtcttcaatgtataaggaaatggtatccaaatctatctgaggatgatgttgttgagaaatgtcctttatgccgtcaaaattgtaattgtagcaaatgcttgcatttgaatggtttaattgagacatcgaagagggaactcgcgaaatctgaaagacgtcatcatctccagtatttgattacgttgatgcttccttttctgaataagttatccatattccagaagctagagattgaatttgaggcaactgttcaaggaaaactgccttctgaagttgaaataactgcggctataagctacactgatgaacgtgtatactgtgatcattgtgcaacttcaattgttgacttgcatcgaagctgtccaaagtgctcttatgaactttgtttgaagtgctgtcaagagattcgtgaaggatcgctttctgaacgccctgaaatgaagttccattatgttgatagaggacatcgatatatgcatggtttagatgctgcggaaccgagcttgtcttccacttttgaagacgaagaagctaacccatctgacgctaagtggagccttggtgaaaatggaagcatcacttgtgcaccagaaaagctaggtggttgtggtgaacggatgctagagcttaggcggatcctaccactcacgtggatgtcagatttagagcacaaagcagagactttcttatcatcatacaatataagccctagaatgttgaactgtaggtgttcttctttggagacagagctgacaaggaaatcagcttcgaggacaacatcaagtgacaactaccttttctgtcctgaatctctcggtgtcttgaaggaagaagagcttcttcattttcaagagcattgggcaaaaggcgaaccagtaatcgttaggaacgctcttgacaacacacctggtttaagctgggagccgatggttatgtggcgggctttatgcgaaaatgtgaattcaacatcaagctctgagatgtcccaagtcaaagcaattgattgcttagctaattgtgaggtggagatcaatactcgtcagttctttgaaggttatagcaaaggaagaacatatgaaaatttctggcctgagatgttgaagcttaaggactggcctccttctgataagtttgaagatcttctacctcgtcactgtgatgagttcatatccgcgttacctttccaggaatatagtgatcctagaactggaattcttaacattgcaacaaagcttcctgaaggatttatcaaaccagatttaggtccaaaaacttacatcgcctatgggattccagatgagcttggtagaggcgattccgtgactaagcttcactgcgatatgtcagacgcggtgaatattctaacgcatacggccgaagtgaccctaagtcaagaacaaatatcctcagtcaaagcactgaaacagaaacacaagttacagaataaggtcgataaacagagtactgaagactgtaacgaaaaggaagaagaagaagaagaagaattgaacatgccagagatttcgagcaatgaaaatgaagaaacgggcagtgctctttgggacatatttaggagagaagacgttcccaagttagaagagtatctaagaaagcattgcaaagaatttagacacacttattgtagtccagttacaaaggtttatcatccgatacatgaccaatcatgctatttaaccttagagcacaaaagaaaactcaaggcggaatatgggatcgagccatggacatttgtgcaaaagctaggtgaagcggtgtttattcccgcgggttgtcctcatcaagttcggaatctaaagtcgtgcacaaaagtcgcagttgactttgtgtcaccagagaacatccatgagtgtctgcgtttgaccgaagagtttcgccaacttcccaaaaaccacaaggccagagaggacaaactcgaggcaagtcttttatctctttga

SEQ ID NO: 70 - DNA, 2187 bp, Arabidopsis thaliana
atgtcggagaacgaaatcgtccctgacgagtttcgttgcaaccgctctgatggtaagcaatggcggtgcaagagacgagctttagaggggaaaaagatgtgtgagagtcatcactcgcagcaaagcctaaagcgaagtaagcagaaagttgcagagtcttctaagcttgtcagatcaagaagaggaggaggagatgaagtggcgtcttcagagatcgagccaaacgaaagcagaattaggtctaagagattggggaaatcgaagaggaagagagtgatgggtgaagcagaggctatggatgaagcagtgaagaagatgaagttgaagagaggagatttgcagttggatttgataaggatggtgttgaagagagaagttgagaagaggaagagattaccaaatagtaataataagaagaagagtaatggagggtttagtgaatttgttggagaagagttaacgagggttcttcctaatggtattatggcaatttctccaccttctcctactactagtaatgtgtcttctccttgtgatgttaaagttggggaagagccaatttcgatgattaaaaggaggtttaggtctaagaacattgaacctttgccaattgggaaaatgcaggattctcagagtgtcaggagtgatattgacagggttttgcatctacattatgcggtgtgcatgctacttccagtactaaaagaaatcaatgcggaacacaaagtggaggtggaaaatgacgcagaaaagaaagtggatttgcaaagaatgtgcacacgcagttcctctgttctcaggctaaattctgaccaagatcagagtcaagagagcttatctagaaaggttggatcggttaaatgctcgaatggtataaaatctccaaaagtgttgctggattttcatcaaaacaatctggaacattttcagacacactggagtaaaggccatcctgtaatagttcgtagtgtgataaagagtggttcaagcctgaattgggatccagtagccttgttctgtcactatcttatgaacagaaacaacaaaaccggtaatactactgattgtatggattggtttgaggtagaaattggtgtcaagcaattttttttggggtctttgagaggaaaggctgagactaatacttgtcaagaaaggctgaagctggagggatggctttcatcttcattgtttaaagaacagttcccaaatcattacgctgaaatactgaatattttaccaatctcccattacatggatccaaagcgcggtctactaaatattgcagccaacctacctgacactgtacaaccacccgattttggcccatgcctcaatatttcatacaggagtggtgaagaatatgcacagcctgattctgtgaagaagttaggttttgaaacttgtgacatggttgatatcttgttatatgtcacagaaacacctgtatccacaaaccagatttgtaggataagaaagctaatgaaaaacatcggaagagtaagatctaaaaatccggcaaaggggagggaaagcagatttgataagggaaagaaacgagataggttggatgactattccagttctgattcagaatcttcacaacactgtttaggcgctaaatgcagaggcagtgagtttgagggagaggaaagagaaagttgcaactactcttgtgaagaagagagcctaagcaacacttatggtgcccagtgggatgtattccaaaaacaagatgtttctaaacttcttgagtatattaagaaccactctctggagctagaatccatggattccagcaaaaaaaaggtgagtcatccattacttgagcagagttactatcttgatgagtatcacaaagcaaggcttaaggaagaatttgacgttgaaccatggagttttgatcaatgtgttggggaagcagtcatcctccctgctggatgtccataccaaattagaaagaataagtcttgtgtaaatgcggttctgaagtttctgtcacctgagcacgttagcgaatctattaaacgagtgaaggagctcaatcaacttcctcagagcgtcaaatcgaaagcaaataagattgaggtgaagaaaatggcgattcataaaatcagcgaagctgtaaaggaaattcgggaactcacatcttcggattcaactggtgcattgagattatataactag

SEQ ID NO: 71 - DNA, 870 bp, Arabidopsis thaliana
atgtcagaattattacagttgcctccaggtttccgatttcaccctaccgatgaagagcttgtcatgcactatctctgccgcaaatgtgcctctcagtccatcgccgttccgatcatcgctgagatcgatctctacaaatacgatccatgggagcttcctggtttagccttgtatggtgagaaggaatggtacttcttctctcccagggacagaaaatatcccaacggttcgcgtcctaaccggtccgctggttctggttactggaaagctaccggagctgataaaccgatcggactacctaaaccggtcggaattaagaaagctcttgttttctacgccggcaaagctccaaagggagagaaaaccaattggatcatgcacgagtaccgtctcgccgacgttgaccggtccgttcgcaagaagaagaatagtctcaggctggatgattgggttctctgccggatttacaacaaaaaaggagctaccgagaggcggggaccaccgcctccggttgtttacggcgacgaaatcatggaggagaagccgaaggtgacggagatggttatgcctccgccgccgcaacagacaagtgagttcgcgtatttcgacacgtcggattcggtgccgaagctgcatactacggattcgagttgctcggagcaggtggtgtcgccggagttcacgagcgaggttcagagcgagcccaagtggaaagattggtcggccgtaagtaatgacaataacaatacccttgattttgggtttaattacattgatgccaccgtggataacgcgtttggaggaggagggagtagtaatcagatgtttccgctacaggatatgttcatgtacatgcagaagccttactag

SEQ ID NO: 72 - DNA, 651 bp, Arabidopsis thaliana
atgaactcattttctgctttttctgaaatgtttggctccgattacgagtcttcggtttcctcaggcggtgattatattccgacgcttgcgagcagctgccccaagaaaccggcgggtcgtaagaagtttcgtgagactcgtcacccaatatacagaggagttcgtcggagaaactccggtaagtgggtttgtgaggttagagaaccaaacaagaaaacaaggatttggctcggaacatttcaaaccgctgagatggcagctcgagctcacgacgttgccgctttagcccttcgtggccgatcagcctgtctcaatttcgctgactcggcttggagactccgaatcccggaatcaacttgcgctaaggacatccaaaaggcggcggctgaagctgcgttggcgtttcaggatgagatgtgtgatgcgacgacggatcatggcttcgacatggaggagacgttggtggaggctatttacacggcggaacagagcgaaaatgcgttttatatgcacgatgaggcgatgtttgagatgccgagtttgttggctaatatggcagaagggatgcttttgccgcttccgtccgtacagtggaatcataatcatgaagtcgacggcgatgatgacgacgtatcgttatggagttattaa

SEQ ID NO: 73 - DNA, 855 bp, Arabidopsis thaliana
atgggtcaagatgaggttgggagtgatcagacgcaaatcataaaagggaaacgtacgaagcgacaaagatcgtcttcgacgtttgtggtgacggcggcgacaacagtgacttcaacaagttcatcggccggtggaagtggaggagaaagagctgtttcagatgaatacaactcggcggtttcgtctccggtgactactgattgtacgcaagaagaagaagacatggcgatttgtctcatcatgttagctcgtgggacagttcttccatcgccggatctcaagaactcgagaaaaattcatcagaagatttcgtcggagaattctagtttctatgtgtacgagtgtaaaacgtgtaaccggacgttttcgtcgttccaagcacttggtggacacagagcgagccacaagaagccgaggacgtcgactgaggaaaagactagactacccctgacgcaacccaagtctagtgcatcagaagaagggcaaaacagtcatttcaaagtttccggctcagccctagcttcacaggcaagtaacatcatcaacaaggcaaacaaagtacacgagtgttccatctgcggttctgagttcacttccgggcaagctctcggtggtcacatgaggcggcacaggacagccgtaaccacgattagccccgttgcagccaccgcagaagtaagcagaaacagtacagaggaagagattgagatcaatataggccgttcgatggaacagcagaggaaatatctaccgttggatcttaatctaccagcaccagaagatgatctaagagagtcaaagtttcaagggatagtattctcagcaacaccagcgttaatagattgtcattactag

SEQ ID NO: 74 - DNA, 741 bp, Arabidopsis thaliana
atggctccagtcggattacctccaggctttagatttcatccgactgacgaagaactcgtaaactattatctgaaaagaaagatcaacggtcaagaaatcgagcttgatataattcccgaggttgatctctacaaatgcgagccatgggacctcgcagagaagtcgtttctaccaagtagagatccggagtggtatttttttgggccacgtgaccggaagtatccgaacgggtttaggacgaaccgagcaacgagaggtgggtactggaaatcgaccggcaaagatcggagagtgacaagtcaaagcagagcgattgggatgaaaaagactttggtttattataaaggaagagctcctcaagggatccgtacggattgggttatgcatgagtatcgtctcgatgataaggattgtgacgatccctcttcgctccaggactcgtatgcattgtgtcgggtattcaaaaagaacggaatatgttcggagttggaatcagaacggcaattgcaaacgggacaatgtagcttcacaacggcgtcaatggaggagatcaattcgaataacaacaacaattataataatgattatgagacaatgtcgccggaggtgggagtttcctccgcctgcgttgaagaagtagtcgatgataaagacgattcgtggatgcagtttataacagatgacgcatgggacacgtcatcaaatggtgcagctatgggacatggtcaaggggtttattga

SEQ ID NO: 75 - DNA, 438 bp, Arabidopsis thaliana
atggagggatatgataatgggtcgttgtatgctccttttttgtcgttgaaatctcattcgaaaccagagctgcatcaaggcgaagaagagagctcaaaggttagatcagaaggttgttcgaaaagcgtggagtcgtcgaaaaagaaggggaagaaacaaaggtatgcgtttcaaacaaggagccaagtggatattcttgatgatggttatcgatggaggaaatatggccaaaaggccgtcaagaacaacaagttccctaggagttactataggtgtacatatggaggatgcaatgtgaagaagcaagtgcaaagattaacagtggaccaagaagtggtcgtgacaacctacgaaggagtgcattcgcatcccatcgagaaatccaccgaaaacttcgagcatattctcactcaaatgcaaatctactcttctttctag

SEQ ID NO: 76 - protein, 645 aa, Arabidopsis thaliana
MDTNTSGEELLAKARKPYTITKQRERWTEDEHERFLEALRLYGRAWQRIEEHIGTKTAVQIRSHAQKFFTKLEKEAEVKGIPVCQALDIEIPPPRPKRKPNTPYPRKPGNNGTSSSQVSSAKDAKLVSSASSSQLNQAFLDLEKMPFSEKTSTGKENQDENCSGVSTVNKYPLPTKQVSGDIETSKTSTVDNAVQDVPKKNKDKDGNDGTTVHSMQNYPWHFHADIVNGNIAKCPQNHPSGMVSQDFMFHPMREETHGHANLQATTASATTTASHQAFPACHSQDDYRSFLQISSTFSNLIMSTLLQNPAAHAAATFAASVWPYASVGNSGDSSTPMSSSPPSITAIAAATVAAATAWWASHGLLPVCAPAPITCVPFSTVAVPTPAMTEMDTVENTQPFEKQNTALQDQNLASKSPASSSDDSDETGVTKLNADSKTNDDKIEEVVVTAAVHDSNTAQKKNLVDRSSCGSNTPSGSDAETDALDKMEKDKEDVKETDENQPDVIELNNRKIKMRDNNSNNNATTDSWKEVSEEGRIAFQALFARERLPQSFSPPQVAENVNRKQSDTSMPLAPNFKSQDSCAADQEGVVMIGVGTCKSLKTRQTGFKPYKRCSMEVKESQVGNINNQSDEKVCKRLRLEGEAST

SEQ ID NO: 77 - protein, 574 aa, Arabidopsis thaliana
MDSGDATSLLLTKIRSLEPDYAPKIIGNSPSSPSSTSPWSFNNCINGNNGNNPHISPKHTPISKPFSSHQSNGLSATHSGSADAAGGADLLDDQQLNDCLSFLDDSCSKTEDLVDPSIPLDYSVDGDGETHLHRRSFSCDASFVSGDDGFGGGCKPCVYFSRGLCKNGESCKFIHGGYPDNMDGNGIVADSPRKMENFVRQHEEMMRLKLAYQQQRLASQILGRAPQLPYEKRMDFLLQQHAQRDGGLPFGDERFWSSSPGRLERMELAMHLGDQSNSASRQIYLTFPADSTFKDEDVATYFSLFGTVQDVRIPYQQKRMFGFVSFAHPETVKVVLARGNPHFICDSRVLVKPYKEKGKVLDKKQQQLLQQQIERGNYSPCSSPSGIDPREQSDFHLGSKMLYERREMMRRKIEQADLLRAIELERRRFINLQLPEFKNSVTLNHHRSFSVGSPGYFSSAGNQSPDFQSELNGADALKVTDDTLELHPYPVVNPMSVNNSYSNGAKEETNKSELLDPDSGSTIELVLPSNLFPSASSTDDHKTDDSAETNAKVGVSSTNENDHEPPVTTNNLMQ

SEQ ID NO: 78 - protein, 535 aa, Arabidopsis thaliana
MVITANDLSKWENFPKGLKVLLLLNGCDSDGDGSSAAETRSELESMDYIVTTFTDETEALSAVVKNPESFHIAIVEVNMSAESESFKFLEAAKDVLPTIMISTDHCITTTMKCIALGAVEFLQKPLSPEKLKNIWQHVVHKAFNDGGSNVSISLKPVKESVVSMLHLETDMTIEEKDPAPSTPQLKQDSRLLDGDCQENINFSMENVNSSTEKDNMEDHQDIGESKSVDTTNRKLDDDKVVVKEERGDSEKEEEGETGDLISEKTDSVDIHKKEDETKPINKSSGIKNVSGNKTSRKKVDWTPELHKKFVQAVEQLGVDQAIPSRILELMKVGTLTRHNVASHLQKFRQHRKNILPKDDHNHRWIQSRENHRPNQRNYNVFQQQHRPVMAYPVWGLPGVYPPGAIPPLWPPPLQSIGQPPPWHWKPPYPTVSGNAWGCPVGPPVTGSYITPSNTTAGGFQYPNGAETGFKIMPASQPDEEMLDQVVKEAISKPWLPLPLGLKPPSAESVLAELTRQGISAVPSSSCLINGSHRLR

SEQ ID NO: 79 - protein, 877 aa, Arabidopsis thaliana
MVPSEPPNPVGGGENVPPSILGGQGGAPLPSQPAFPSLVSPRTQFGNNMSMSMLGNAPNISSLLNNQSFVNGIPGSMISMDTSGAESDPMSNVGFSGLSSFNASSMVSPRSSGQVQGQQFSNVSANQLLAEQQRNKKMETQSFQHGQQQSMQQQFSTVRGGGLAGVGPVKMEPGQVSNDQQHGQVQQQQQKMLRNLGSVKLEPQQIQAMRNLAQVKMEPQHSEQSLFLQQQQRQQQQQQQQQFLQMPGQSPQAQMNIFQQQRLMQLQQQQLLKSMPQQRPQLPQQFQQQNLPLRPPLKPVYEPGMGAQRLTQYMYRQQHRPEDNNIEFWRKFVAEYFAPNAKKRWCVSMYGSGRQTTGVFPQDVWHCEICNRKPGRGFEATAEVLPRLFKIKYESGTLEELLYVDMPRESQNSSGQIVLEYAKATQESVFEHLRVVRDGQLRIVFSPDLKIFSWEFCARRHEELIPRRLLIPQVSQLGSAAQKYQQAAQNATTDSALPELQNNCNMFVASARQLAKALEVPLVNDLGYTKRYVRCLQISEVVNSMKDLIDYSRETRTGPIESLAKFPRRTGPSSALPGPSPQQASDQLRQQQQQQQQQQQQQQQQQQQQQQQQTVSQNTNSDQSSRQVALMQGNPSNGVNYAFNAASASTSTSSIAGLIHQNSMKGRHQNAAYNPPNSPYGGNSVQMQSPSSSGTMVPSSSQQQHNLPTFQSPTSSSNNNNPSQNGIPSVNHMGSTNSPAMQQAGEVDGNESSSVQKILNEILMNNQAHNNSSGGSMVGHGSFGNDGKGQANVNSSGVLLMNGQVNNNNNTNIGGAGGFGGGIGQSMAANGINNINGNNSLMNGRVGMMVRDPNGQQDLGNQLLGAVNGFNNFDWNA

SEQ ID NO: 80 - protein, 359 aa, Arabidopsis thaliana
MMIGESHRGFNPTVHIPPWPLSEDLTVSDIYGSPDGGSSMMEALAELQRYLPSNEPDPDSDPDLSGPDSPIDAYTCDHFRMYEFKVRRCARGRSHDWTECPYAHPGEKARRRDPRKFHYSGTACPEFRKGCCKRGDACEFSHGVFECWLHPARYRTQPCKDGGNCRRRVCFFAHSPDQIRVLPNQSPDRVDSFDVLSPTIRRAFQFSISPSSNSPPVSPRGDSDSSCSLLSRSLGSNLGNDVVASLRNLQLNKVKSSLSSSYNNQIGGYGSGFGSPRGSVLGPGFRSLPTTPTRPGFMNIWENGLEEEPAMERVESGRELRAQLFEKLSKENCMGRIEPDPDQGAGDTPDVGWVSDLVM

SEQ ID NO: 81 - protein, 262 aa, Arabidopsis thaliana
MCGGAVISDYIAPEKIARSSGKSSWRSNGVFDCSIYDFDGNFDELESDEPFVFSSTHKHHASGSASDGKKKQSSRYKGIRRRPWGRWAAEIRDPIKGVRVWLGTFNTAEEAARAYDLEAKRIRGAKAKLNFPNESSGKRKAKAKTVQQVEENHEADLDVAVVSSAPSSSCLDFLWEENNPDTLLIDTQWLEDIIMGDANKKHEPNDSEEANNVDASLLSEELLAFENQTEYFSQMPFTEGNCDSSTSLSSLFDGGNDMGLWS

SEQ ID NO: 82 - protein, 637 aa, Arabidopsis thaliana
MTTEQALLSMEALPLGFRFRPTDEELINHYLRLKINGRDLEVRVIPEIDVCKWEPWDLPGLSVIKTDDQEWFFFCPRDRKYPSGHRSNRATDIGYWKATGKDRTIKSKKMIIGMKKTLVFYRGRAPRGERTNWIMHEYRATDKELDGTGPGQNPYVLCRLFHKPSDSCDPAHCEEIEKVNFTPTTTTRCSPDDTSSEMVQETATSGVHALDRSDDTERCLSDKGNNDVKPDVSVINNTSVNHAETSRAKDRNLGKTLVEENPLLRDVPTLHGPILSEKSYYPGQSSIGFATSHMDSMYSSDFGNCDYGLHFQDGASEQDASLTDVLDEVFHNHNESSNDRKDFVLPNMMHWPGNTRLLSTEYPFLKDSVAFVDGSAEVSGSQQFVPDILASRWVSEQNVDSKEAVEILSSTGSSRTLTPLHNNVFGQYASSSYAAIDPFNYNVNQPEQSSFEQSHVDRNISPSNIFEFKARSRENQRDLDSVVDQGTAPRRIRLQIEQPLTPVTNKKERDADNYEEEDEVQSAMSKVVEEEPANLSAQGTAQRRIRLQTRLRKPLITLNNTKRNSNGREGEASHRKEKEDISSSSSWQKQKKSLVQFSSVVIIVAVIVVLVEIWKESRDAKCSFLFHQLDSFKGMFT

SEQ ID NO: 83 - protein, 454 aa, Arabidopsis thaliana
MGSRLNFKSFVDGVSEQQPTVGTSLPLTRQNSVFSLTFDEFQNSWGGGIGKDFGSMNMDELLKNIWTAEESHSMMGNNTSYTNISNGNSGNTVINGGGNNIGGLAVGVGGESGGFFTGGSLQRQGSLTLPRTISQKRVDDVWKELMKEDDIGNGVVNGGTSGIPQRQQTLGEMTLEEFLVRAGVVREEPQPVESVTNFNGGFYGFGSNGGLGTASNGFVANQPQDLSGNGVAVRQDLLTAQTQPLQMQQPQMVQQPQMVQQPQQLIQTQERPFPKQTTIAFSNTVDVVNRSQPATQCQEVKPSILGIHNHPMNNNLLQAVDFKTGVTVAAVSPGSQMSPDLTPKSALDASLSPVPYMFGRVRKTGAVLEKVIERRQKRMIKNRESAARSRARKQAYTMELEAEIAQLKELNEELQKKQVEIMEKQKNQLLEPLRQPWGMGCKRQCLRRTLTGPW

SEQ ID NO: 84 - protein, 597 aa, Arabidopsis thaliana
MCGAKSNLCSSKTLTEVEFMRQKSEDGASATCLLEFAACDDLSSFKREIEENPSVEIDESGFWYCRRVGSKKMGFEERTPLMVAAMYGSMEVLNYIIATGRSDVNRVCSDEKVTALHCAVSGCSVSIVEIIKILLDASASPNCVDANGNKPVDLLAKDSRFVPNQSRKAVEVLLTGIHGSVMEEEEEELKSVVTKYPADASLPDINEGVYGTDDFRMFSFKVKPCSRAYSHDWTECPFVHPGENARRRDPRKYPYTCVPCPEFRKGSCPKGDSCEYAHGVFESWLHPAQYRTRLCKDETGCARRVCFFAHRRDELRPVNASTGSAMVSPRSSNQSPEMSVMSPLTLGSSPMNSPMANGVPLSPRNGGLWQNRVNSLTPPPLQLNGSRLKSTLSARDMDMEMELRFRGLDNRRLGDLKPSNLEETFGSYDSASVMQLQSPSRHSQMNHYPSSPVRQPPPHGFESSAAMAAAVMNARSSAFAKRSLSFKPAPVASNVSDWGSPNGKLEWGMQRDELNKLRRSASFGIHGNNNNSVSRPARDYSDEPDVSWVNSLVKENAPERVNERVGNTVNGAASRDKFKLPSWAEQMYIDHEQQIVA

SEQ ID NO: 85 - protein, 222 aa, Arabidopsis thaliana
MAKMGLKPDPATTNQTHNNAKEIRYRGVRKRPWGRYAAEIRDPGKKTRVWLGTFDTAEEAARAYDTAARDFRGAKAKTNFPTFLELSDQKVPTGFARSPSQSSTLDCASPPTLVVPSATAGNVPPQLELSLGGGGGGSCYQIPMSRPVYFLDLMGIGNVGRGQPPPVTSAFRSPVVHVATKMACGAQSDSDSSSVVDFEGGMEKRSQLLDLDLNLPPPSEQA

SEQ ID NO: 86 - protein, 638 aa, Arabidopsis thaliana
MANRGGEYLYDELWKLCAGPLVDVPQAQERVYYFPQGHMEQLEASTQQVDLNTMKPLFVLPPKILCNVMNVSLQAEKDTDEVYAQITLIPVGTEVDEPMSPDPSPPELQRPKVHSFSKVLTASDTSTHGGFSVLRKHATECLPPLDMTQQTPTQELVAEDVHGYQWKFKHIFRGQPRRHLLTTGWSTFVTSKRLVAGDTFVFLRGENGELRVGVRRANLQQSSMPSSVISSHSMHLGVLATARHATQTKTMFIVYYKPRTSQFIISLNKYLEAMSNKFSVGMRFKMRFEGEDSPERRYSGTVIGVKDCSPHWKDSKWRCLEVHWDEPASISRPNKVSPWEIEPFVNSENVPKSVMLKNKRPRQVSEVSALDVGITASNLWSSVLTQPHEFAQSCITSQWSSPQQCHRDANEDAKKSDWLNNSYSVSNVAKDSTLNDQMVSPVEQKKPETTANYRLFGIDLMSSSLAVPEEKTAPMRPINISKPTMDSHSDPKSEISKVSEEKKQEPAEGSPKEVQSKQSSSTRSRTKVQMQGVPVGRAVDLNALKGYNELIDDIEKLFDIKGELRSRNQWEIVFTDDEGDMMLVGDDPWPEFCNMVKRIFIWSKEEVKKMTPGNQLRMLLREVETTLTTTSKTDNHSN

SEQ ID NO: 87 - protein, 243 aa, Arabidopsis thaliana
MIGQLMNLKATELCLGLPGGAEAVESPAKSAVGSKRGFSETVDLMLNLQSNKEGSVDLKNVSAVPKEKTTLKDPSKPPAKAQVVGWPPVRNYRKNMMTQQKTSSGAEEASSEKAGNFGGGAAGAGLVKVSMDGAPYLRKVDLKMYKSYQDLSDALAKMFSSFTMGNYGAQGMIDFMNESKLMNLLNSSEYVPSYEDKDGDWMLVGDVPWEMFVESCKRLRIMKGSEAVGLAPRAMEKYCKNRS

SEQ ID NO: 88 - protein, 620 aa, Arabidopsis thaliana
MALSLLRKNKHGFDIVISDVHMPDMDGFKLLEHVGLEMDLPVIMMSADDSKSVVLKGVTHGAVDYLIKPVRMEALKNIWQHVVRKRRSEWSVPEHSGSIEETGERQQQQHRGGGGGAAVSGGEDAVDDNSSSVNEGNNWRSSSRKRKDEEGEEQGDDKDEDASNLKKPRVVWSVELHQQFVAAVNQLGVEKAVPKKILELMNVPGLTRENVASHLQKYRIYLRRLGGVSQHQGNLNNSFMTGQDASFGPLSTLNGFDLQALAVTGQLPAQSLAQLQAAGLGRPAMVSKSGLPVSSIVDERSIFSFDNTKTRFGEGLGHHGQQPQQQPQMNLLHGVPTGLQQQLPMGNRMSIQQQIAAVRAGNSVQNNGMLMPLAGQQSLPRGPPPMLTSSQSSIRQPMLSNRISERSGFSGRNNIPESSRVLPTSYTNLTTQHSSSSMPYNNFQPELPVNSFPLASAPGISVPVRKATSYQEEVNSSEAGFTTPSYDMFTTRQNDWDLRNIGIAFDSHQDSESAAFSASEAYSSSSMSRHNTTVAATEHGRNHQQPPSGMVQHHQVYADGNGGSVRVKSERVATDTATMAFHEQYSNQEDLMSALLKQEGIAPVDGEFDFDAYSIDNIPV

SEQ ID NO: 89 - protein, 345 aa, Arabidopsis thaliana
MEELKVEMEEETVTFTGSVAASSSVGSSSSPRPMEGLNETGPPPFLTKTYEMVEDPATDTVVSWSNGRNSFVVWDSHKFSTTLLPRYFKHSNFSSFIRQLNTYGFRKIDPDRWEFANEGFLAGQKHLLKNIKRRRNMGLQNVNQQGSGMSCVEVGQYGFDGEVERLKRDHGVLVAEVVRLRQQQHSSKSQVAAMEQRLLVTEKRQQQMMTFLAKALNNPNFVQQFAVMSKEKKSLFGLDVGRKRRLTSTPSLGTMEENLLHDQEFDRMKDDMEMLFAAAIDDEANNSMPTKEEQCLEAMNVMMRDGNLEAALDVKVEDLVGSPLDWDSQDLHDMVDQMGFLGSEP

SEQ ID NO: 90 - protein, 687 aa, Arabidopsis thaliana
MAGFDENVAVMGEWVPRSPSPGTLFSSAIGEEKSSKRVLERELSLNHGQVIGLEEDTSSNHNKDSSQSNVFRGGLSERIAARAGFNAPRLNTENIRTNTDFSIDSNLRSPCLTISSPGLSPATLLESPVFLSNPLAQPSPTTGKFPFLPGVNGNALSSEKAKDEFFDDIGASFSFHPVSRSSSSFFQGTTEMMSVDYGNYNNRSSSHQSAEEVKPGSENIESSNLYGIETDNQNGQNKTSDVTTNTSLETVDHQEEEEEQRRGDSMAGGAPAEDGYNWRKYGQKLVKGSEYPRSYYKCTNPNCQVKKKVERSREGHITEIIYKGAHNHLKPPPNRRSGMQVDGTEQVEQQQQQRDSAATWVSCNNTQQQGGSNENNVEEGSTRFEYGNQSGSIQAQTGGQYESGDPVVVVDASSTFSNDEDEDDRGTHGSVSLGYDGGGGGGGGEGDESESKRRKLEAFAAEMSGSTRAIREPRVVVQTTSDVDILDDGYRWRKYGQKVVKGNPNPRSYYKCTAPGCTVRKHVERASHDLKSVITTYEGKHNHDVPAARNSSHGGGGDSGNGNSGGSAAVSHHYHNGHHSEPPRGRFDRQVTTNNQSPFSRPFSFQPHLGPPSGFSFGLGQTGLVNLSMPGLAYGQGKMPGLPHPYMTQPVGMSEAMMQRGMEPKVEPVSDSGQSVYNQIMSRLPQI

SEQ ID NO: 91 - protein, 337 aa, Arabidopsis thaliana
MEKSDPPPVPKPGATIIPSSDPIPNADPIPSSSFHRRSRSDDMSMFMFMDPLSSAAPPSSDDLPSDDDLFSSFIDVDSLTSNPNPFQNPSLSSNSVSGAANPPPPPSSRPRHRHSNSVDAGCAMYAGDIMDAKKAMPPEKLSELWNIDPKRAKRILANRQSAARSKERKARYIQELERKVQSLQTEATTLSAQLTLYQRDTNGLANENTELKLRLQAMEQQAQLRNALNEALRKEVERMKMETGEISGNSDSFDMGMQQIQYSSSTFMAIPPYHGSMNLHDMQMHSSFNPMEMSNSQSVSDFLQNGRMQGLEISSNSSSLVKSEGPSLSASESSSAY

SEQ ID NO: 92 - protein, 315 aa, Arabidopsis thaliana
MTSFQVMRSSNSRNSDLSRRISSASTSSSSIRPQQQFRRDLTSVGYGGRNDGLYSSNSMTVEGILHDTFASDPPAPTESSLLDASINLMDASPAPMEITTTTASDVVDHGGGTETTRGGKSVDEIWREMVSGEGKGMKEETSEEIMTLEDFLAKAAVEDETAVTASAEDLDVKIPVTNYGFDHSAPPHNPFQMIDKVEGSIVAFGNGLDVYGGGARGKRARVMVEPLDKAAAQRQRRMIKNRESAARSRERKQAYQVELEALAAKLEEENELLSKEIEDKRKERYQKLMEFVIPVVEKPKQQPPRFLRRIRSLEW

SEQ ID NO: 93 - protein, 1183 aa, Arabidopsis thaliana
MGTELMRICVKEDSDDLPSVPPGFESYATFTLKRVVPATTSDKAKTPAIESVSATEQAKMEVESDEAKAARALRRRPWINHSGCDDDGDCAANNDNAASQNPDQNCDVKPALPKGVVRGCEECKDCQKEFEDTLNYIAKIRPEAEKYGICRIVPPPSWKPPCPLKEKQVWEGSKFTTRVQRVDKLQNRSSMKKISKLPNQMRKKKRKCMKMGMDSVTNGMGDPCSASTGMNELETFGFEPGPGFTLKDFQKYADEFKAQYFKKSETSTDDKCKVDNSIDCWEPALEDVEGEYWRIVDKATEEIEVLYGADLETGVFGSGFPKISSSHNASSSEDKYAKSGWNLNNFPRLPGSLLKYEGSDISGVLVPWLYIGMCFSSFCWHVEDHHLYSLNYMHWGAPKLWYGVGGKDAVKLEEAMRKHLPDLFEEQPDLLHKLVTQLSPSKLKTAGVPVHRCVQHAGEFVLTFPRAYHAGFNSGFNCAEAVNVAPVDWLPHGQIAIELYCQQGRKTSISHDKLLLGAAREVVKADWELNLLRKNTVDNLRWKAFSAKDGILAKTLKARIDMERTRREFLCNSSLALKMHSNFDATNERECCICFFDLHLSAAGCRCSPEKYSCLTHVKELCSCPWVTKYFLFRYDIDELNVLVEAVEGKLSSVYRWARQDLGLALSTDVSGSKMEIDEEGKVHKDPTPQTTALSGKDLQLKVTSKEVSKELEKTSKLSHVNLLLKEKEEQITSSHCMKPVKEETVCDSSDPNVSACQPSEGGIICMTAVKSASGKKNSQSLPNDVILLSDDEYDIPRKRGSVRRDAISSGKKLEIRERPTHVLALEASAKIAAPICQREGDSLRDTRNTISLPTNDQKTMRRDVPSSTSHAEVNAEATGLTQDICNRMATNSHGGGKPTSCKSKNSGGLAIVDVVDGTRSSSGTPSCSQNNSPDRFIRQKGPRIAKVVRRINCNVEPLSYGCVLSGKSWCSRRAIFPKGFRSRVKYINILDPTNMCFYISEILDAGRNSPLFMVYLESNPSEVFVHMSPTRCWEMVRERVNQEITKQHKAGKSDLPPLQPSGSPDGFEMFGYSSPAIVQAIEALDVNRVCTDYWDSRPYSRPQVQFPANPLLREANTSGRSNVGNLQLNPGHHISPTGINSILKVLFKKASMEELSSLQEVLSETNSDMVTELVKEEIQNRR

SEQ ID NO: 94 - protein, 883 aa, Arabidopsis thaliana
MDSGVKLEHMNCFQLSYQYSWTTRKKRTLKPFMSKGSSPSSSSDSRKRKLSRAEDSDDSAVKRNAKRRRKICKVEEYYEDDDCILSDWVQRNTAKRIDKRNEEVEVMVKIESGDDCTIGKWFSDVSSKRKDKRQVEVDEDEEWEEEVTLCSKIKATSSRSRTHSLSANSPENVTDVISPCRSRSPASNVSDSIQKNDCTSSRKQSGPICHQCLKGERITLLICSECEKTMFCLQCIRKWYPNLSEDDVVEKCPLCRQNCNCSKCLHLNGLIETSKRELAKSERRHHLQYLITLMLPFLNKLSIFQKLEIEFEATVQGKLPSEVEITAAISYTDERVYCDHCATSIVDLHRSCPKCSYELCLKCCQEIREGSLSERPEMKFHYVDRGHRYMHGLDAAEPSLSSTFEDEEANPSDAKWSLGENGSITCAPEKLGGCGERMLELRRILPLTWMSDLEHKAETFLSSYNISPRMLNCRCSSLETELTRKSASRTTSSDNYLFCPESLGVLKEEELLHFQEHWAKGEPVIVRNALDNTPGLSWEPMVMWRALCENVNSTSSSEMSQVKAIDCLANCEVEINTRQFFEGYSKGRTYENFWPEMLKLKDWPPSDKFEDLLPRHCDEFISALPFQEYSDPRTGILNIATKLPEGFIKPDLGPKTYIAYGIPDELGRGDSVTKLHCDMSDAVNILTHTAEVTLSQEQISSVKALKQKHKLQNKVDKQSTEDCNEKEEEEEEELNMPEISSNENEETGSALWDIFRREDVPKLEEYLRKHCKEFRHTYCSPVTKVYHPIHDQSCYLTLEHKRKLKAEYGIEPWTFVQKLGEAVFIPAGCPHQVRNLKSCTKVAVDFVSPENIHECLRLTEEFRQLPKNHKAREDKLEASLLSL

SEQ ID NO: 95 - protein, 728 aa, Arabidopsis thaliana
MSENEIVPDEFRCNRSDGKQWRCKRRALEGKKMCESHHSQQSLKRSKQKVAESSKLVRSRRGGGDEVASSEIEPNESRIRSKRLGKSKRKRVMGEAEAMDEAVKKMKLKRGDLQLDLIRMVLKREVEKRKRLPNSNNKKKSNGGFSEFVGEELTRVLPNGIMAISPPSPTTSNVSSPCDVKVGEEPISMIKRRFRSKNIEPLPIGKMQDSQSVRSDIDRVLHLHYAVCMLLPVLKEINAEHKVEVENDAEKKVDLQRMCTRSSSVLRLNSDQDQSQESLSRKVGSVKCSNGIKSPKVLLDFHQNNLEHFQTHWSKGHPVIVRSVIKSGSSLNWDPVALFCHYLMNRNNKTGNTTDCMDWFEVEIGVKQFFLGSLRGKAETNTCQERLKLEGWLSSSLFKEQFPNHYAEILNILPISHYMDPKRGLLNIAANLPDTVQPPDFGPCLNISYRSGEEYAQPDSVKKLGFETCDMVDILLYVTETPVSTNQICRIRKLMKNIGRVRSKNPAKGRESRFDKGKKRDRLDDYSSSDSESSQHCLGAKCRGSEFEGEERESCNYSCEEESLSNTYGAQWDVFQKQDVSKLLEYIKNHSLELESMDSSKKKVSHPLLEQSYYLDEYHKARLKEEFDVEPWSFDQCVGEAVILPAGCPYQIRKNKSCVNAVLKFLSPEHVSESIKRVKELNQLPQSVKSKANKIEVKKMAIHKISEAVKEIRELTSSDSTGALRLYN

SEQ ID NO: 96 - protein, 289 aa, Arabidopsis thaliana
MSELLQLPPGFRFHPTDEELVMHYLCRKCASQSIAVPIIAEIDLYKYDPWELPGLALYGEKEWYFFSPRDRKYPNGSRPNRSAGSGYWKATGADKPIGLPKPVGIKKALVFYAGKAPKGEKTNWIMHEYRLADVDRSVRKKKNSLRLDDWVLCRIYNKKGATERRGPPPPVVYGDEIMEEKPKVTEMVMPPPPQQTSEFAYFDTSDSVPKLHTTDSSCSEQVVSPEFTSEVQSEPKWKDWSAVSNDNNNTLDFGFNYIDATVDNAFGGGGSSNQMFPLQDMFMYMQKPY

SEQ ID NO: 97 - protein, 216 aa, Arabidopsis thaliana
MNSFSAFSEMFGSDYESSVSSGGDYIPTLASSCPKKPAGRKKFRETRHPIYRGVRRRNSGKWVCEVREPNKKTRIWLGTFQTAEMAARAHDVAALALRGRSACLNFADSAWRLRIPESTCAKDIQKAAAEAALAFQDEMCDATTDHGFDMEETLVEAIYTAEQSENAFYMHDEAMFEMPSLLANMAEGMLLPLPSVQWNHNHEVDGDDDDVSLWSY

SEQ ID NO: 98 - protein, 284 aa, Arabidopsis thaliana
MGQDEVGSDQTQIIKGKRTKRQRSSSTFVVTAATTVTSTSSSAGGSGGERAVSDEYNSAVSSPVTTDCTQEEEDMAICLIMLARGTVLPSPDLKNSRKIHQKISSENSSFYVYECKTCNRTFSSFQALGGHRASHKKPRTSTEEKTRLPLTQPKSSASEEGQNSHFKVSGSALASQASNIINKANKVHECSICGSEFTSGQALGGHMRRHRTAVTTISPVAATAEVSRNSTEEEIEINIGRSMEQQRKYLPLDLNLPAPEDDLRESKFQGIVFSATPALIDCHY

SEQ ID NO: 99 - protein, 246 aa, Arabidopsis thaliana
MAPVGLPPGFRFHPTDEELVNYYLKRKINGQEIELDIIPEVDLYKCEPWDLAEKSFLPSRDPEWYFFGPRDRKYPNGFRTNRATRGGYWKSTGKDRRVTSQSRAIGMKKTLVYYKGRAPQGIRTDWVMHEYRLDDKDCDDPSSLQDSYALCRVFKKNGICSELESERQLQTGQCSFTTASMEEINSNNNNNYNNDYETMSPEVGVSSACVEEVVDDKDDSWMQFITDDAWDTSSNGAAMGHGQGVY

SEQ ID NO: 100 - protein, 145 aa, Arabidopsis thaliana
MEGYDNGSLYAPFLSLKSHSKPELHQGEEESSKVRSEGCSKSVESSKKKGKKQRYAFQTRSQVDILDDGYRWRKYGQKAVKNNKFPRSYYRCTYGGCNVKKQVQRLTVDQEVVVTTYEGVHSHPIEKSTENFEHILTQMQIYSSF

SEQ ID NO: 101 - DNA, 10 bp, Artificial Sequence
  Made in the lab
gtgcaatgag

SEQ ID NO: 102 - DNA, 10 bp, Artificial Sequence
  Made in the lab
caatgcgtct

SEQ ID NO: 103 - DNA, 10 bp, Artificial Sequence
  Made in the lab
aggatacgtg

SEQ ID NO: 104 - DNA, 10 bp, Artificial Sequence
  Made in the lab
tccctttagc

SEQ ID NO: 105 - DNA, 10 bp, Artificial Sequence
  Made in the lab
cggataactg

SEQ ID NO: 106 - DNA, 10 bp, Artificial Sequence
  Made in the lab
aggttctagc

SEQ ID NO: 107 - DNA, 10 bp, Artificial Sequence
  Made in the lab
tccgacgtat

SEQ ID NO: 108 - DNA, 10 bp, Artificial Sequence
  Made in the lab
ggaagacaac

SEQ ID NO: 109 - DNA, 10 bp, Artificial Sequence
  Made in the lab
agaagcgatg

SEQ ID NO: 110 - DNA, 10 bp, Artificial Sequence
  Made in the lab
ccatttacgc

SEQ ID NO: 111 - DNA, 18 bp, Artificial Sequence
  Made in the lab
uuuaaccgcatccttctc

SEQ ID NO: 112 - DNA, 20 bp, Artificial Sequence
  Made in the lab
tactaatacgactcactaaa

SEQ ID NO: 113 - DNA, 30 bp, Artificial Sequence
  Made in the lab
gactagctggaattcaaggatgcggttaaa

SEQ ID NO: 114 - DNA, 30 bp, Artificial Sequence
  Made in the lab
cagccaacggaattcatacgactcactaaa

SEQ ID NO: 115 - DNA, 40 bp, Artificial Sequence
  Made in the lab
  misc_feature (1)...(40): n = A,T,C or G
attcgaattccgaggcggccgacatgttttttttttttvn

SEQ ID NO: 116 - DNA, 39 bp, Artificial Sequence
  Made in the lab
aagcagtggtatcaacgcagagtgaattctacggccggg

SEQ ID NO: 117 - DNA, 23 bp, Artificial Sequence
  Made in the lab
aagcagtggtatcaacgcagagt

SEQ ID NO: 118 - DNA, 26 bp, Artificial Sequence
  Made in the lab
attcgaattccgaggcggccgacatg

SEQ ID NO: 119 - DNA, 519 bp, Cucurbita maxima
cgggggatccaaattaaattcaagctgaactcatccatttctctgcattattctcccaatcttcattcttaaaaatgtctggacgtggaaagggcggcaagggcttgggaaaaggaggagcaaagcgccacaggaaggttttgagagataacattcagggcattaccaagcctgccattcgccgtttagctcgtagaggcggtgtgaagcgtatcagtggattaatctatgaagaaaccagaggagttttgaagattttcctcgagaatgtgattcgcgatgctgtgacctatactgagcacgctaggaggaagacggtgactgccatggatgtggtttatgcattgaagaggcagggaaggactttgtatgggtttggaggttaggtcataggttaattttacgaatcattgtatatctgagatttggaaatctagtcattgatgttcttttagttttactcggaagtcgttcatcgttgttcttgcaatgaaattttaattgatcgtgtaaaaaaaa

SEQ ID NO: 120 - DNA, 1275 bp, Cucumis sativus
ggaagacaactccaagtcaggaaactgtttccaaccgtcgcagtttgacgcgtacttgtgttcatgaagtagcggttccggttgggtactcttctaccaaagatgagtcggttcatggaaccctacctaatccagtttacaatggtacaatggcaaaaacgtatccgtttacgctcgacccatttcagcaggtatcggtttcttgcttagaacggaacgaatctattttggtttctgcgcatacttcagctggaaaaactgcggttgctgaatatgccattgcaatggcttttagagacaagcagagggttatatatacttccccacttaaggctttgagtaatcaaaagtatagggaattgagtcaagagtttaaagacgtgggattgatgactggagatgtaactctttcgcctaatgctagttgtttagtaatgacgacggagatacttagggggatgctttacaggggttcggaagttttgaaggaagtagcatgggtaatttttgatgaaattcattatatgagagatagggaaagaggtgttgtttgggaagaaagtataatatttttaccaccggctatcaaaatggtcttcctttctgcaacaatgtccaatgccacagagtttgctgagtggatatgttatatacacaagcagccttgtcatgtggtgtacaccgatttccgaccaactcccttgcaacattatgtttttcctgcgggtggcaatgggttgtatcttgtggttgacgaaaacgaacagtttagggaggataattttctaaagttgcaggatacatttgctaaacaaaaacagattgttggccataggactgcaaatgggaaatctagtgggagaattgctaaaggtggcagtgcttccggaggttcggacatttataaaattgttaagatgattatggaacgaaattttcaaccagtcattgtcttcagtttcagtagaagagaatgtgaacagcatgcgatgtccatgtccaaacttgactttaatactcaagaagaaaaggatatggtggaacatattttcagaaatgcaattctctgtttgaatgaagaagatagagaactgcctgcaattgagttaatgttacctcttctccagagaggtattgctgttcatcattctgggcttcttccagtaattaaggagttagtggagcttcttttccaggaaggtcttgttaaggctctttttgccacagaaacttttgccatgggtttgaacatgccagcaaaaacagttgtcttcc

SEQ ID NO: 121 - DNA, 1086 bp, Cucumis sativus
ttcagttgctagtaatgaaagggaaattattcctgacatagaggttcaacagggagaaatcaagtatgtcttttctgatggaattggaaaaatatcaagcaaattcgccaaagaggttgctgcaaaatgtggtttccaagccgtcccgtctgcttttcaaattcgttatggtggatataagggtgttgttgctgttgatccgtactcaactataaaattatctctgaggaagagtatgtgcaaatttgaatcagacaacacaaaacttgacgtcttaggccatagcaaataccaaccatgcttccttaatcgtcaactgattactctcatgtctactctaggtgttagagacgaaatttttgagaaaaaacaaagtggagctgtagaacaattggatgccattttaacagatccattgaaggctcaagaagctttggagttgatgtctcccggagagaatactaatattctcaaggaaatgctcaaatgtggctatcaaccagatgtcgagccgtatctgtcaatgatgttacaagctttccgggcatcaaagttgctagagttacgcaccaaatcaagaatctttatcccaaatgggagagcgatgatgggatgtcttgatgagaccaggaccttggaatatgggcaggtatttgtgcaaatctccagtggtagacatcgaaatttatctgaatccttcgcattcaatagaattggtcgagaacaccatttagttattgaaggaaatgttacagttgctaaaaatccctgcctgcaccctggtgatgttcgtgtattaaaggctgtaaatatacctggtttgtaccatatggttgactgtgtagtttttcctcaaaaaggatcaaggcctcatccgaatgaatgctcaggtagtgatttagatggtgatatttactttgtctgttgggacaccgaattgatcccgtctcgacaaattccacctatggattatactcctgcacctccaaatgagttagatcgtgatgttacaactgaggatatccaagaatattttgtgaactacatggttaatgatagtcttggaatcattgccaatgctcatac

SEQ ID NO: 122 - DNA, 1352 bp, Cucurbita spp
ggtttctttgatcagttgaattcgtttcagtgccctagggtctgatatggctgatgctctttctgttattcctgcatttgtgctccgtaacctttctgataaactctatgagaaacggaagaacgctgctcttgaggttgagggaattgtgaagcaacttgcttcggctggagatcatgagaagataacggcggttatcaatctgctgaccaacgatttcactatgtcgcctcaagcgaatcataggaagggaggattgatagggcttaatttagcggccgcgaattcgcccttcaatgcgtctcaacatcttgagcaaatcgtacctcctgtgctcaattctttttctgatcaagatagcagagtgcgttattatgcatgtgaagctctatacaacattgcaaaggttgtcagaggcgattttataattttttttaaccagatatttgatgccttatgtaagctttcggctgattcagatgccaatgtacaaagtgctgctcatctcttggatcgtcttgtgaaggatattgttactgaaagtgatcagtttagcatcgaagagtttattccattgctgagggagcgtatgaatgtcctaaatccctatgtccgtcagtttttggttggatggatcactgtacttgatagcgtgccagatattgatatgttgggctttcttcctgattttcttgatggtttgtttaatatgttgagtgattcaagtcatgaaatccggcagcaagctgattctgctctttcggagtttcttcaagagataaaaaattctccatctgtagattatggccggatggctgagattctggtccagagggcttcttctcccgacgaatttactcgcttaacggctattacatggattaacgagtttgtaaaacttggtggagatcaactagtaccttattatgctgatattctgggagcaattctaccttccatagctgataaagaagagaagattagagtggttgcacgggaaactaatgaagagcttcgtaatatcaaggcatttccaactgaaggatttgatgttggtgctatcctttctattgctaggagacaattatctagcgaacatgaggccactaggattgaagcattatattggatatcaacacttttagacagacatcgaactgaggtattaatctatttggatgatatacttgacagccttcttcaagccctatctgatccttctgatgaggtggtgctccttgttctcgatgttcatgcttgcatagcgatagatcagcaacattttcgccaacttgttgtcttccaagggcgaattcgtttaaacctgcaggacgagaccctttagtgagggt

SEQ ID NO: 123 - DNA, 759 bp, Cucumis sativus
aagcgatggaaatttcgaagcgcaacaatcaagaacattagactatcttgctgtgtggcaggacatatcaaagttgcagaagctggtgaagatattcaagaaaccatggatattcttgttgacgatggtttggatcctatgtcacaggagtactcttacctaaaatataatctcctttatggtgggagctgttctaggtgtggagagtggtgtcgtttacctgtgattgcaccatgtaggcatcttctgtgccttgattgtgttgctctggacagtgaagggtgcacctttcctggctgtggtaaattatatgtgatgcagactcctgaaaccttagcacggccagaaaatcccaatccaaaatggcctgttcctaaggatcttattgagttgcaaccatcatataagcaagataactgggatcctgattggcaatcaacatctagcagtaaagttgcatatctcattgagagattaaaagatttaagtgaaacaaataatgaggctgctttgctccctccctcatcattgactaaatctggtgcactactacaggaagttgaccactcaagggctatcacttcagatcatgaaatagtcagagataaagttcttattttctctcaatttctcgagcatattcatgtcattgaacaacagttaaccattgcgggcatcagatttgctgggatgtatagtccaatgcatgctagtaataagatgaagtcattggccatgtttcagcatgatgcaagctgc

SEQ ID NO: 124 - DNA, 1167 bp, Cucumis sativus
aatttagcggccgcgaattcgcccttggaagacaactaagtatgttgaaaaggttcaggaaggaggagcaggattgagggagaacgaggaaattagtagttctcctgaaagacaatcgcccaagggatcatccaagaaagtaagattttcagaagatgtggagatctttccactagttgatgaccaaaatagtgggaaaactaaggaagatgacggtttaattagagggaagcggttttccaaagaagaagacgagatagtgaaaaaggctgtcttcgaatacattgagaaacacgctcttggtgatgaaggtctcaaaatggttcttcattgcagggagtatccagagatcaaaagttgttggaaggacataggaaaagccataccttataggccttatttgagtgtatattatagagctcacatcttgtttgaaagggatgagaagcgtaaatggactcatgaggaatatgaacttgttcgaaagtttcatgacacacatgggtcagattggaaaggattagccgatgtccttggaaaacacaggtttcatgtgaaagatacatggaggcgtataaaactccccaatatgaagaaagggcaatggacacaagacgagtaccagaaattatttgatttagttaacaaagacctgcgactcaaggcttatgaggaaaaaagatccaagcatgggatgcttcgtgacaatatctgctggggagcaatcagcgacgtgttgtccacaagatcaactgctctttgctgccagaaatggtatcgccagttaacatcgccaatggttgctgagaatgaatgggcagatgtagacgactaccggcttgttgatgctctctctagcttggatgcctactccattgaagatgtggaatgggaccaactgcttgaacacagagatggtgatgtatgtagaaagcggtggtctcaaatggtcaaacacataggtgataatgggaacaagtcattttctgaacaagttgaagtcctctcccagcgatatagcattgatgtacttgatgcaagagaagcctatgacaatgcgcctgtagttgattaggcaaagcatagttcaaatctcgtcaaatttcttttcattcaggaggtatagtatcaagatgtctaattgcagtaagttgtcttccaggggcg

SEQ ID NO: 125 - DNA, 321 bp, Cucurbita spp
gtgcaatgaggcctaaattacaacaatcaaaaatgaagaagaaaaagaggaggagaagcggcgaggtggattcattggagcagatagcgggtagcatacggtggttggcggaggtagtggtgcgctcggaacaagctagaatggagatgattaaggatatagaaaagatgagagctgaagcagaggccaaaagaggggagttggatctcaaaagaacacaaatcattgcaaatactcaattggagatagctaagctctttgcatctccaaccaacaaacctcttgttgatcattcttcaccactaagaattgctagaacct

SEQ ID NO: 126 - DNA, 746 bp, Cucurbita maxima
ttgattacatgggttaaaggtcagtcaagatgaagaaccagttgcagtaagcattgtctcatctggtgggtatgaggatgatacaaatgatgcagatgtgttaatctacagtggccagggtggagtgaacagaaaggataaggaatcaacagatcaaaagcttgaaaggggtaatcttgcactagagaagagcttgcatcgtggaaatgaggttagagtagttcgaggggtaagagattttagtaacccaacagggaagatctatgtttatgatggtctttataaaatccaagagtcttgggtagagaaagggaaatctggctgcaatgtatttaaatacaaactagtgcgattacctggacagcgggaagcattcttgacttggaaattagtccaacaatggaaggatgggaatgcatcccgaattggggttataataccagatctggcttctggcgcagaaagtcttcctgtttcacttgtgaatgatgttgacgatgagaagggccctgcatattttacgtattatgctggtctcaaatatttaaaacctgtatgctctacagagccttcagctggctgtaactgtattggtggatgccttccaggcaatctcaattgcccttgcatgcagaaaaatggtggatatctcccctatagttctaatggggttcttgcgagtcagcaatctatgatatatgaatgtggcgcctcatgtcaatgccctcccaattgcaggaatcgta

SEQ ID NO: 127 - DNA, 627 bp, Cucumis sativus
agaagcgatgcactaagcacttggctagaaacttgtccatccatagcgttatcaatatactccaactcgcaagaatgtgcgatgcaccggatctctcactcagctgtatgaaaatggtgtccacccacttcaaggccgttgagaaaacggaaggctggaaattcctgcaaaaacacgactcttggctcgagcttcaaattctgcagttcatggatgaatccgaattgaggaaaaagagatgcagaaggcagaggaaagagcagagggtttatcttcagctaagcgacgcaatggagtgtttagagcacatctgtaaagaagggtgcacaaacgttgggccgctggacgtggtacccacaaagaagcagccatgttctaaatactctacgtgtcgtggagttcaacttctgattaagcactttgcaacgtgtgagaacagagtccacggaggagcttgctggcggtgcaaacgaatgtggcagcttctacgcttgcatgcctccatctgccaccaatccgatgcttgcaaagtccctctttgcagacaattcaaacaaaaaatgaagcaagagaatgttgaaaaagaggatgcgaagtggaaactgctggtgaaaaaggtgttgtctt

SEQ ID NO: 128 - DNA, 1432 bp, Cucurbita spp
aggttctagcgttccaagtagcttaccttctgtgatgagatctgaatcaattggcaaccaatctggcttcattgactctggtcattcaccttcacaactaaagctgggtatccgggcagcttcggctattcatcctcattcccttccagaacatcctgatgggttgaacaacaatgttcactgcaattctatgaatgcaattgcaggaaacatcagtctacgaccacccgaaagagctgatagcaggcagctatgtggagtgaactttaatggtcgctcaattgaattaaatgaagatgtttttgcatctggaggtaacagagctggccccattccgggaccgcattatacatggggtaattcctaccggccccagcctccagctccaggtgttgtatggccaaattctccatcgtatatgaatggaatttctgctgctcataccccgacccaagtccatggagttccaagagcagcatctcatttgatgcacacagttctgcccatgaataatcaccatgttggatcagcaccagcagttaatccttctatttgggataggcagcatgcttatgctggggaattgtcaaaagcctctggttttcattcaggttctattgggaatatgaatctgcctaacaattcaccacaatctatggaatttttctctcgcatcttcccacaagttggtggaaattctgttgagcttcctatcccccaacgaaatgtaggactacaatcccatcatcagcggtgcatggtttttcctggacgaggccaagttcttccaatgatgaattcatttgactcttcaaacgaacgtggtagaagccgaagaactgaagctgcctctaatcaagcagataagaagcaatatgaacttgatattgatcgcatactgaggggtgaagacaatcgtactacacttatgataaaaaacattcctaacaaatatacttcaaagatgcttttggctgcaattgatgaacgccatcgaggaacttatgacttcatctatctgcccattgactttaagaacaaatgtaatgtgggatatgcgttcattaacatgactgatcctagcctaatcattccattctatgaggcatttaatggaaaaaaatgggagaaattcaatagtgagaaggtggcatcacttgcatatgctcgcatacagggaaaagctgctctcatcgctcatttccagaattcaagcttaatgaatgaggagaagcgatgtcggccaatccttttcaacactgatggccccaatgcaggcgatcaggttccgtttccaatgggggtaaatgttcgtactaggcctggaaaagcccgaagcagtaaccaggaggaaaaccatgatgaagctctagtaatttctgaaaacgatgagaattattccacgtggagacgcattgaagggcgaattcgt

SEQ ID NO: 129 - DNA, 673 bp, Cucurbita maxima
gggggcacttcagtttcagcattctcaagcacgagtcaaactacgaattcccttgagatcttctttactaatggctcgcactaagcaaactgccaggaaatccaccggaggaaaggctccgaggaagcaacttgcaaccaaggctgctaggaaatcggctccggcgaccggcggagtgaagaagccacacaggttcaggccggggacggtggcgttgagagagattcgcaagtatcagaagagtacggagcttctcattaggaaacttccgttccagagattggtgagggaaattgctcaagatttcaagactgaccttcgtttccagagcagcgctgtagcggctcttcaggaggctgctgaggcgtatctcgtcgggctcttcgaagacacaaatctttgtgccattcatgccaagagggtcaccattatgcccaaggacatccagctcgctagaagaattagaggcgagagggcttaagtctagttgtctatccatctgcatctagttgaagaaatcgagttcttaaacctgtctgatgaattcactctgtaaaatttgctttaaattaatggccatttgaaatttctctgttccaagtgtctgttgaatatagttttttttatgtgatttaatcaaaccttctcgaactgttagtaagcataaaaaaaa

SEQ ID NO: 130 - DNA, 1348 bp, Cucurbita spp
ggtaatcgcaactccgacgcaagttttcaccttctgattctcttcgccggtcgctccaatttcgtcgatcatggcgaatcaagctgaatcctccgactccaagggcacgaagaaggactttagcaccgccattttggagcggaagaaagccctaaatcgacttgtcgtcgatgaagcgatcaacgatgataactcggtcgtcgcgcttcatcctgataccatggagaaacttcaactcttccgcggggataccatcctcattaagggaaagaagaggaaagacacaatatgcattgctttagctgatgatacttgtgatgagcctaaaataaggatgaacaaagttgtgagaagcaatcttcgggttaggcttggagatgttgtctctgtgcaccaatgtgctgatgttaaatatgggaagcgtgttcatattcttcctgtggatgatactattgaaggggttactggaaatctttttgatgcatatttaaagccctatttcttggaggcatatcgtccattgaggaagggcgacctgttccttgtgagagggggaatgaggagtgtagagttcaaggttattgagaccgatcctgctgaatactgtgtggtagccccagacacagagatcttttgtgaaggggagcctgtgaaaagggaggatgaggatagattagatgaagttggttatgatgatgttggtggagttaggaaacaaatggctcagattcgtgaattggttgagctgccacttaggcatccgcagctgtttaaatcaattggtgtgaagccgcccaaaggaattttgctgtatggaccccctgggtctgggaagactttgattgcacgtgctgttgccaacgaaactggtgcatttttcttctgtatcaatggacctgagatcatgtcaaagttggctggtgaaagtgaaagtaacctcagaaaagcttttgaggaagcagagaaaaatgcaccatctattattttcattgatgaaattgattcaattgctcccaagcgagagaagaccaatggggaagttgagcgaagaattgtctcacagctactgacgctcatggatggattgaagtctcgtgcacatgtcattgtgattggtgctacaaatcgacccaacagcattgacccagctctgagaagatttggaagatttgatagggaaatagatattggtgtgcctgatgaagttgggcgtctagaagttctacgcattcactctaagaacatgaagcttgctgaagaggttgatttaaagaggattgccaaggatacacatggctacgttggtgctgatttggccgctctctgtactgaggctgctcttcaatgc

SEQ ID NO: 131 - DNA, 782 bp, Cucurbita maxima
  misc_feature (1)...(782): n = A,T,C or G
ggggatctcgatccggcggctctgaagattcggccgacggcggtggaggcggtggcggtaaactcggtgttcgatccacaccggttgttggctcgacctggagcgatagagaaggttttggggttgataaagacgacgcagccgaagatcgtgacgattgtggaacaggaagcgaaccacaacgggccgattttcctggaccggtttactgaggcgttgcattattactcgaacctgtttgactcgctcgaggggtcatcaatcgggttcgaacccgcgaatgaggacgtgttattgtccgaggtttatttggggagacagatttgcaacgtggtggcatgtgaaggaacggaccgagttgagcgacacgagtcattgactcagcggagaactcggattgaatcgtccgggtttgacccggtccatctcggttcgaacgcgttcaagcaggctagtatgcttttggccctctttgctggcggagaagggtacagggtggaggagaataatgggtgtttaatgcttggctggcacactcgaccgttgattgccacatcagcatggcaactcgctcccgatgggtcgaagtgagtcgactcactgggtgatgaatgagtttgtggacctgttttttctttttttctttttttttctgcctttttatttggagggtggattaatgatgatatataataaataatataatttttgggttatgaagctttacaataaatatggtgagcccttaatttaataatatttggagattttctgntnaacaa

SEQ ID NO: 132 - DNA, 687 bp, Cucurbita maxima
ggggcttcaaaagagattaggtcacctcccagctcggtttcgacacgccatgccgagaaatcgtgaccctctagtcgtcgggagagtgatcggcgacgtcgtcgactcgttctcgaggtccatctcgattagggttgtttacgactcgagggaagttaacaatgggtgtgagctcaaaccctctcaagctgtcaacaagccaagagttgagattggtggcactgaccttcgcaccttcttcactttggttatggtggatcccgacgctcctagccctagcgatcccaatctaagagaatacttgcattggttagtgaccgatattccagctacaaccgaggcaacctttggacaagagatagtgtgctacgagaatccaagaccaacggtgggtatccaccgttttgtgctggtcttgttccggcagctcggaaggcaaacggtgtatgctcctgggtggcgccagaacttcaacaccagacactttgcagagctttacaatcttggttcgccagtcgccgccgtctatttcaattgccaaagggaaaatggctccggtggaaggagaagagccggcgatgaatgttcataaaaacacttcacttcacattatattatcaaccaatatattgtaataacatggttcacgtttctatctaatagattatatatttttaataaaaaaaa

SEQ ID NO: 133 - DNA, 1011 bp, Cucurbita maxima
aagcgatgttgtaatcaaaggtagtattgctcacataacacaaatgaccatgcaacccaccttacgaaaactaatcattgactctcagaggtctgatgaacaccttggaaaaccgtgggatcagatatagattgaaaggccagtggggtactcaatctcttcagatgggggtttgctgtggacaaatcgcctgttccccgtgacaagaaaattcttaaggatattatgacagaagctcacgattcttcttatacgttccaccctggaagtacaaagatgtatcaggatcttaagggatgttattggttaccagggatgaaaaaggagatagcagattttgtaagccgatgcttgacctgtcagcaggtgaaggccccgagacagtgttcagtaggactgctacaacccttaaaggttccgcagtggaaatgggaagcagtttgcatggatcttatctcaggcttgcccaagaccaaacagagcttcaacgtaatctaggtagttgttgatagacttaccaaaatggctcacttcatcccaggcaaaaccacttatcgtgtggatcagtgggctcaattgtatatcagagagatagtacgcctgcatggtgtgctggtgtctatagtatctgatcgagacactaagttcatctcccaattttggaaaagcctccaaaaagcattggggactcagctaaagtttagtacaacattccatccttaaatggacggacaaaccgaaagactgaatcaaaccttagaagatatgttgcgagcctgtgtcatggatttcgctgggtgctgggatgaacatctaccactgatggagtttgcctacaataatagttaccaagcgaccatccagatggccccttttgaggcactgtatgggcgtaggtgttgaacactggtgttttgggaagaagtaggcacgtagcaactactgggaccagagttggttcaggccaccaacgcagcagtgcagaaaattaaacaaagaatcctcattgca

SEQ ID NO: 134 - DNA, 709 bp, Cucurbita maxima
aagaaagatggaatagtttgtaatgctgctctctgtaagcttggatgtgaacacaaaatttcgggctttattcgagacgaggctttcgatcctcaaaagtgggctattcctggtgatacacatgaagttcaccaattaacagaggaagtgctttctaatgggagaaaagtttatgttcggagaaaaagaaaggtaaaaggtaagaggatagctgacgttgttgaggcgctaatcggtgcatatcttagcactggtggggaaagggcagctattcagtttctaaatcggatcggtatagaagtgtattttgatattgtaccttacgagagaccttttagcgtcgatgcgcacaagctcattaatgtcagacatttagagttcctgctgaattacacgttcaatgatccctcattgttgttagaagcaatgactcatggttcatatatgtttcaagaaattccaagatgttatcagcgactggaatttcttggagactcggtattagattacgtcgttactgtgcatttgttcaacaaatatcccggaatgtcaccgggattgttgactgacatgaggtctgcgtccgtgaacaacgattgttatgcacgaactgcagtaaaggctcagctgtacaaaagtattctgcatttgtctcatgatctccacaagcatattagttcgacccttaaaaacttcgagatgttgtctt

SEQ ID NO: 135 - DNA, 704 bp, Cucurbita maxima
tgaaatgacaagtgaagatattgagaatgaatccaaggtttcgaatgtgccaggtcctagctctatggagactgatactcaaaagaaggaccagttgcctcaagtagaaccaatttcttcagaagaaacttctactgcttgtgatgacaattctgatagattagaattaagtcggctttacaatgagatgtgcaaggttttggatgaaaattgcaaagagctggtccatgcaccctctgggagccaccatgcagcttctgacttgaaaaataacctccttcccttggagaagatttttgaagacgtggaccgaattctttcttcacagtcaaaccccattaacgaacaaccaatgtcggtttctgatccacaacccgttgtcgttgaatcaccgagcaccgattttggtcttaaaccatcacttgcagatccagacagtgaaagggatgctgttgtcacagaaatggagatagatcctgcaaaagattcagaatcgaaaaaagaaagcgacaggttgatgccaatagatcttgatctcatcgacgaaaagcctgaaccatctgctcgagtagaaatggccgaatcatcttctcgtgttccagcttccgatgatccatgcccagatcagccagattctacacctctaccggagaaacgtagcgttgttgatgaaatggaagttgaagtgagcaaggacatcgctt

SEQ ID NO: 136 - DNA, 830 bp, Cucurbita moschata
gtgcaatgagatataacgatgaaaagaacgatgttcatgtgatggcaaaaaccttgctggaaaaatttgaagagaagtggctgcagcttttgcccaaagttgccgaggaggaaaaaagaaaagtggaggaggaagtcgagtttcagtttgatatgcagcatgcccaggaggcaacttacgctaacatggcaagagatataagcaatgagatttctgaggccgatatgaacttgaagggtctcagggaaatggttatccagagatgcaggaaaatgtccaccgaagagaagagaaaacttggaatagctctcacccgattgtcgcctgaagatctcacgaaggccctagaaatagttgccgagaacaatccaaactttcaagcaactgctcaggaagtggaccttgacattgatgctcagaatgagtacacattgtggcggttaaaagtttttgttaaagatgcacttgctataaaaagcaagagtgctgtagccatcgactccatcgacaatgataacattgatgataacaagaagaataactcgaaagggagaagagaaatttgtgatgccgttgtcaaatctgctataaaaaggacaaaaaaagttgtctaatatgtattcgactattgttggcactaatggcgttctttgcatccagtcatcagtttgtaattagagtgagaaagatgaagctacttgcaccaggtggctatttccatctgcctattgaatacgttatgtgtgtgtgtgtatgtataaagcttcctattgaatatgcccttataaacgctcttcttaaatagttgaaatttttacaattgccccaca

SEQ ID NO: 137 - DNA, 697 bp, Cucurbita moschata
ggatggactttcaaccctcctgcccgacacacaggcgaatgcttgtgatattgtggaggatggtagttttaccattgatgcggcaaattatggtaatattgggagatttatcaaccatagttgctcacccaatctttacgcccaaaatgttctttatgatcacgaggataagcgaattccacatattatgttctttgctgccgagaatattcctcccttacaggagctatcttaccattacaattatatgatcgatcaagttcgtgattctgatggaaatgttaaaaagaagagatgtcactgtggttccgtggagtgtactggttggatgtattgagttttggccaagaagttccaatcaatcaacagaattgtatgtttcttcttaggtagaagaaaggatcggaaacttgctatcttttccaagtagccgtcgttcgagcctactttttatgcttgttctcaacccatgactaatatgagctcgaagtttctttcgtaactcccgaaacttcttcgtagtggctccgttcagaacagagatgccttggaggcaggagttactgacttgtgctattttgagttggaagtttcagcagaaaatgaacaagaccacgtacttggttccatcggatttttgttttaaaggcaatgtataatgaaaagaatgcttttcttaacacaacaggcatcgctt

SEQ ID NO: 138 - DNA, 402 bp, Cucumis sativus
acgattcctgtttccccttttaactccaatccggtctgcaattattcgaagacaagtgtatttcccagacagaaggttaatacaatttgactgcggcaaattgcaggaacttgctattctacttaggaaactaaaatctgaaggtcaccgagcattaatattcactcaaatgacaaaaatgcttgatatcttggaggcgttcatcaatctgtatggttacacttacatacgtctggatggatccactcagcctgaagagagacagacattaatgcaacgatttaacaccaaccctaaaatttttcttttcatcttatcgactcgcagtgggggtgtaggtatcaatcttgttggtgcagacactgttatcttttacgacagtgattggaaccctgctatgga

SEQ ID NO: 139 - DNA, 685 bp, Cucumis sativus
ttctagcactaccggattttcaattgccattttaaatagaaacagacgcttcagggttcggtctcggggcagttttatcacaaaataagagacctattgcatactttagccagagactcttcgagacagccaaagagagatccatttatgagagagagctaatggcaattgtattagcggttgagaaatggtgacactacttgttgggacatcgctttattgtatacattgaccaaaaagccttgcggcatatcttggagcaaaggaagattttgtcgggcatccaaaaatgggtaatgaaattgatcggcttcgatttcaaaatcttttatcgagtgggaccggagaacaaggcagcagatgcactttcgcgaattccgagtaccctccttgttggatctcgaggcagtggagaaaaaagttcaagaggatgagacgctaaaaaatatatttgaacgagtgattcaggacccagaatgtgtgcctcattatgtggtacgccatggcaaattattcttcaaaggcaaattggttctcccaaggacatccagcttaattctgaccatcctccacaccttctacaattccgtgattaggggccatttggggcagttacgaacatataagagaattgcggcagaactgttttgggaaggaaatgagagtgacatcaaaatttacgttg

SEQ ID NO: 140 - DNA, 611 bp, Cucurbita maxima
  misc_feature (1)...(611): n = A,T,C or G
cggggnatcctttatttttcattcaaaatattactgagtttgaacttcatctctttctgtatccaaatttcgacaaatcaatggcgggaagaggcaaaactttaggatctggagcgtcgaagaaggccacttcaaggagtagcaaggccggccttcaatttcccgtcggtcgtattgctcgtttcttgaaagccggtaaatacgctgaacgagtcggtgctggagctccggtttacctcgccgccgtcctcgaatatcttgcagcggaggttctggaattggctggaaatgccgcaagggacaacaagaagactagagttgtgcctcgccatatccagcttgctgtgaggaacgacgaagagctgagcaagcttcttggagatgtaacgattgcgaatggcggtgttatgcctaacattcacaatctgctattgccaaagaaggctggtagttccaaggcgtctggtggtgaggatgaatcctaaattaaatgaagaaacgtggtcgaggtgttcagatctggagtttaggtttgttagctttgtgtgctttactttaatgtgttcttaactntaatcaaagagctgatgtgcatacgatcaatcttcttc

SEQ ID NO: 141 - DNA, 610 bp, Cucurbita maxima
catacatttatacaaatggaaacaaggggtgatgaaggaggtatctgaaggtaaactagctacctcagcagacagcagatgcatgggtgcagctttaactaaagctcacacttctctgttaagagtgctaattacggagcttcaatccaaggtagctgctcttgtggatccaaattttgattctggagagtcaaaaccaaaacgaggaaggaaaaaggatgtggatagtgcaacttctattaggaaaacaaagctgaatttgctccctctcaatgaactaacatggccagaattagcccgccgttacatcttggctgtcttatccatggatggtaatcttgagtcagctaaagtaactgctcgtgaaagtggaagagtatttcgatgtctacaaggtgatggtggtgtgctttgtggctctctcacgggagtggctgggatggagtcagatgcatttcttctggctgaggctacaaaccaaatatatggatcgttaaatagagaaaagcatgttattacattagaagaggaagactctgatgccaccggtggttgtgagaaggtgctggcgactgatggtaagatgccagagtgggcacaagtgctagaa

SEQ ID NO: 142 - DNA, 1124 bp, Cucurbita spp
ttctagcagattatgttcatagaaaagggctcaagctcggaatttactctgatgctggtatccagacttgcagtaagaagatgccaggttccttggatcacgaagaacaagatgcaaaaacctttgcatcatgggggatcgattacttgaaatatgataactgtgaaaatactggtacaagcccaaaagaaaggtatccgaagatgactaaagccttgcaacaatctgggagacccatacttttttctttatgtgaatggggacaagaagacccagctacttgggcagtgaatgtaggaaatagttggagaacaacatcagatatggaagacaactggaacagtatgacaactattgctgatcagaatgacaaatgggcatcttatgctaaacctggaggatggaatgatcctgacatgcttgaagtggggaacggagggatgacaacagcagaataccgctctcattttagcatttgggcactggcaaaagctcctttgctgattggatgtgacatcagatcaatggacaacatcaccttgaaattgttaagtaataaggaggttattgcagttaatcaggataagcttggagttcaagggaagaaggtttacaaacttggagatcttgaggtttgggcagggacacttagtggtaaaagagtcgctgtggttctgtggaacagaggcttttatagagccaaaatcactgcatcttggtcagctattggtttgagtccatcaactactgttacttcccgagacttatgggagcactccagtcaggtggttcagcatcaacttactgctcaagtagaccctcatgactgtaagatgtatgttctcactccccattaaagcccaaagagaaaacaccgccaatgttcttgtgattgattattgttgtcttccattcagtctctatgctgtgtttcctgggattttacatgctttatctgtttgagatgaggtctttatttcttcaatgtggatgaacaaatgctctttggaatttttatttgttaggtacttacatagttgttctctatttggaacatagacatcaaatgcatttgtgcttcattccacttcctattatgtgatcaagcttttgatgttgaacgg

SEQ ID NO: 143 - DNA, 580 bp, Cucurbita maxima
aaatgtcacataaagttcctggaaacacaaggtattgcaggagttagtcaccacaatttgctcttctccaagacagctccagaacctgtgcacgtattggaggaagaagaggcatctttcaggaggaataaggagtttgcttttggtgaaagagcaacttcaagttcttcacccgatcctgatacagatggggcaaggtttgcttttaacccaaagaatgtgaagttgaatagatttgctacaaatgcaagcagtccaagcaagccgactgaaagggaaatcaaagagagaatcaatcggctgtcccaaactctagaaaataaggtccttatctcaagattaccagacaggggagaaagaattcagaagcaaattgttgaactgaatttacagctttctgaattgaagagaaaagaacatgaaagtgaagtcatcgacatcaccgacgagtttcagaaggtgctgaatgtatagtttgtattgtgatgtgaagactgaatcttctcatgagtgaggcatgaggctgactatatatgtattttgagacaactgaggttttgttctttaatatgctacacca

SEQ ID NO: 144 - DNA, 673 bp, Cucurbita maxima
cacatgggaaggtaggtcgctggacccgtgcataccatttaaaagtgcctcttccacccatgcccccacaacctgcccgaggtggccctcgtcagaggattcttcctacccctcgtggtgtaaatatgataatttggagcctagataatcgttttgtcttagcagctataatggattgtagaatttgtgtttggaatgcctctgatgggagcttagtgcactctttgacgggtcatactgaatctacgtatgtactcgatgttcatccttttaatccaaggattgctatgagtgctggatacgatggaaaaacaatagtttgggatatttgggaaggcacgccaattcggatatatgaaatttctcatttcaaactggttgatgggaagttttcttcagacgggacatcaattatactttcagatgatgttgggcagctatatatattaagcaccggtcagggagaatcccaacaggatgccaagtatgatcagttctttcttggtgactatcgcccacttattcaggatcctttcggcaatgtagttgaccaagaaacccaactcagtacttacagacggaatttgcaagatctcctttctgactcaggcatgataccttatccggaaccttatcagactgcatatcagcaaagacgtttaggtgctatgga

SEQ ID NO: 145 - DNA, 365 bp, Cucurbita moschata
gtgcaatgagaaggctgcatttgagagacccatgtatgctgaagcatattgcaacatgggcgtaatatataaaaaccgtggggacctagagtcagctattgcttgttatgagaggtgcctagctgtttcaccaaatttcgagattgcgaagaataatatggcaattgccttgacagatttaggaacaaaggttaaactggagggtaatatagcccagggtgtagcatattataagagagctctgtattacaattggcactatgctgatgctatgtacaatcttggggttgcatatggtgaaatgcttaaatttgacatggctattgttttttatgagctagctttccatttcaatcctcattgca

SEQ ID NO: 146 - DNA, 618 bp, Cucurbita moschata
cagataggattcaactgttgtgcacaagttctcttaagatcagtgcttgctgagaaacaagaattatgtttctctgttatttctctactgtggcataagttaattacagctccagaaactcaaccgagcgtggagagcacttcagcgcagcaaggatggagacaggtagttgatgcattatgcaacgtggtatcagcttccccagctaaagcagctacagcaattgtccttcaggcggagaggcagttgcaaccttggattgcaaaagacgatgatcaaggtcagaagatgtggagaatcaaccagcggatcaccaaactcatagttgagctaatgagaaatcacgatactccagaatcgctggtcgtattggcgagtgcgttagatctactgttgcgtgccacagatggcatgcttgtagatggtgaagcctgtactttgccacaactagagctattggaagcgactgctagagcagttaagcctgtactggagtggggagaatctggactgtcaattgctgatggcctttccaatctcttaaagtgtcgtctaccagctactgttcgatgcctatctcatccaagtgcgcacgtccgagccttaagcacatcgctt

SEQ ID NO: 147 - DNA, 600 bp, Cucurbita moschata
acactagcgcgtaccttgaagaagtgttctcaaaatgataatgggactgaaaatgaagagtctatctcagatatcgatcttgagatactgttggcgctgggaacacttcagagctggaggaaatggatccacctagtgctctgctatgtgaacttcggccctaccaaaagcaggctcttcattggatgatccatctggagaaaggaaagtgcatggatgaggctgcaacaacccttcatccatgttgggaagcttatcgtctaatagacgagagggagcttgtcatctatttaaattctttttctggtgaagcaacgacagagttcccaagcactcttcaaattgccagaggagggattctggctgatgccatgggccttgggaagaccatcatgaccatatcccttcttcttgcccattcagaaagaggtggagtatccaatagtcagctgacatgttcctcagttgaaggagatgatggaagtatggaccaatctttgaatcctttgaagaaggctaaaattacaggttttgagaagttgcagaagaggaacaccttagcaagcggcggcaatctgattatttgtcccatgtcccttc

SEQ ID NO: 148 - DNA, 633 bp, Cucurbita moschata
cgattcctggagtgcacattggcgatctgttcttctttaggatggaattgtgtgttgttggattgcacggtcaggctcaagctggaattgactatgtccctgcgagtcagagctccaacggcgagccaattgccactagcgtgattgtttctggtggggatgaggacgatgaggattctggagacacgataatctatacgggtcatggtgggcaagacaaattttcaaaacaatgtatgcaccagaagcttgaaggtgggaaccttgcactggagagaagcatgcactacgggattgaagtgagggtaatacgaggtatgaagtacgccggcagtgtaacaagtaagatttatgtatacgatggtctatatagaattctcgaatgttggtttgatgtggggaagtctggttttggtgtttacaagtttaagcttctaaggattgatggtcaagccgaaatgggtagctccattttgaaatttgcagagaacctcaggtctaaaccattgtctttgaggccttctggttatctcagtctcgatatttcaatgaagaaggaggctgttccagttctcctcttcaatgatattgacaacgatcaagaaccattgtattatgagtatcttgttggga

SEQ ID NO: 149 - DNA, 695 bp, Cucumis sativus
gcaggtgtaaacaagccatggggttttgcctccataacaatgcggcagtttctgcattggcagctcaggctgctggtgctaagaaggtgttaatagttgattgggatgttcatcatggaaatggaacacaggaaatatttgagcaaaataaatcggtcttgtatatatctttacataggcatgagtttggtagattctatcctggaacaggagctgctgatgaggttggcactatgggagcagaaggatattgtgtaaatgttccttggagtcggtcaggagttggtgataacgattacatttttgcgtttaagcaagttgtgcttcccatagcttctgcttttgcccctgatctcactatcatatcagcagggtttgatgctgctaggggtgatccattgggaatgtgtgatgtaactcctaccggctataatcttcgttccatttcatcttcagctactgcagttatcaaggtattgctgggtgaaagtcctgaatgtgacttggatgatcacttaccctccagcgctgggatgaaaacagtattagatgtgcttgcgattcaaaaaaatttctggcccgtgctggaatctagcttttcaaaactgcagtcaatgttggagatatttgccaccgaaagaagaggaaaagtaaaaccatgtaagcagagaagacgtgctgtggtggctccgatt

SEQ ID NO: 150 - DNA, 919 bp, Cucurbita maxima
ggcgaccaaaaagaggggcttcgttttgtgaatggtttgggaggaagataaaaggagagtgaagagaagagagtaagaggaattagggttgactgttgagacacgagagaaatgggacggaagaagatcgaattgaagcggatcgaagatatgtgtaatcgccatgtgactttctgcaagagaagatctggattaatcaagaaggctcgagaactctctgttctctgcgacgttgaggtcggactcgtcatcttcaccaaccgcggccgtctctatgagttttgcagcggcgacagcttattgaatattattaagcgctaccaaagccactttgaagggagaagtgaaagtcaaaacgaggttgatacaaaggagaatgaagaatctgatgagacactcatggtgtcatttggaaagctcctacaaactattcaaagtcatgttgaagaaccagatttcaaaaagctcaatgtaaatgatatggtgcacctggagaatcaacttgaagcctcacttgacaaaatcaaatctcaaagagttgaggcaatgatggaaaatagcagttggatagacaaaatggatatggctatcgccatggtcgacagccaactttaattagtgaagtgcctcgaacaacaatgtggttgatattgtagtcccaaataaaataaagagaagctgcacaattgtatgagttcctaacaccctgctaaactgcaaaagcaaatcagcatactatgtgacatctgaatatacatataatggttctagcataatatcaggtaaaatgaccacgcagcagcaaacacttacttgatgcctgcataattaaattttatccattaatgcttgtaattttccataaaactttatttagtgaaatcttcttggtgtcaaaaaaaaactgagactagttccc

SEQ ID NO: 151 - DNA, 705 bp, Cucurbita spp
tagaagcgatgaagagggaaaatttgccccttccctggaaactcttgaaattagcaggaccaagattgttaagtcaattccaaactattttggtggtgaagatgaagatggtattcctgaccttgctgatattgaagaaaatgatgacgctcttgcaactgatgcagccactctgccattgacctaccaaattgcccatgaacctgatgacgataatatccttcgaacacgaacttatgatgtcagcatcacgtatgataaatattatcagacaccacgtgtttggctgacaggatatgatgagtcaaggatgctcttacagccagaacatgtgcttgaagatgttagtcaagatcatgcacgaaaaacggtgaccattgaggaccatccccacctacctggaaagcatgcatctgtacatccctgcagacatggggctgtgatgaaaaagatcattgatgtgttgatgtcccggggcgtagaaccggaagttcacaagtatcttttcttgttcttaaaatttgtcgcgtctgttattccgactatcgaatatgattatactatggacgttgatcttggaggccctagccgtcgataactgggattgatgaatattgacactctgctcatgtccgattatacatatgtggggtatttcacatctgatgtttctgtaaatgcaggctgacactctgctcattgcac

SEQ ID NO: 152 - protein, 103 aa, Cucurbita maxima
MSGRGKGGKGLGKGGAKRHRKVLRDNIQGITKPAIRRLARRGGVKRISGLIYEETRGVLKIFLENVIRDAVTYTEHARRKTVTAMDVVYALKRQGRTLYGFGG

SEQ ID NO: 153 - protein, 424 aa, Cucumis sativus
KTTPSQETVSNRRSLTRTCVHEVAVPVGYSSTKDESVHGTLPNPVYNGTMAKTYPFTLDPFQQVSVSCLERNESILVSAHTSAGKTAVAEYAIAMAFRDKQRVIYTSPLKALSNQKYRELSQEFKDVGLMTGDVTLSPNASCLVMTTEILRGMLYRGSEVLKEVAWVIFDEIHYMRDRERGVVWEESIIFLPPAIKMVFLSATMSNATEFAEWICYIHKQPCHVVYTDFRPTPLQHYVFPAGGNGLYLVVDENEQFREDNFLKLQDTFAKQKQIVGHRTANGKSSGRIAKGGSASGGSDIYKIVKMIMERNFQPVIVFSFSRRECEQHAMSMSKLDFNTQEEKDMVEHIFRNAILCLNEEDRELPAIELMLPLLQRGIAVHHSGLLPVIKELVELLFQEGLVKALFATETFAMGLNMPAKTVVF

SEQ ID NO: 154 - protein, 361 aa, Cucumis sativus
SVASNEREIIPDIEVQQGEIKYVFSDGIGKISSKFAKEVAAKCGFQAVPSAFQIRYGGYKGVVAVDPYSTIKLSLRKSMCKFESDNTKLDVLGHSKYQPCFLNRQLITLMSTLGVRDEIFEKKQSGAVEQLDAILTDPLKAQEALELMSPGENTNILKEMLKCGYQPDVEPYLSMMLQAFRASKLLELRTKSRIFIPNGRAMMGCLDETRTLEYGQVFVQISSGRHRNLSESFAFNRIGREHHLVIEGNVTVAKNPCLHPGDVRVLKAVNIPGLYHMVDCVVFPQKGSRPHPNECSGSDLDGDIYFVCWDTELIPSRQIPPMDYTPAPPNELDRDVTTEDIQEYFVNYMVNDSLGIIANAH

SEQ ID NO: 155 - protein, 432 aa, Cucurbita spp
MADALSVIPAFVLRNLSDKLYEKRKNAALEVEGIVKQLASAGDHEKITAVINLLTNDFTMSPQANHRKGGLIGLNLAAANSPFNASQHLEQIVPPVLNSFSDQDSRVRYYACEALYNIAKVVRGDFIIFFNQIFDALCKLSADSDANVQSAAHLLDRLVKDIVTESDQFSIEEFIPLLRERMNVLNPYVRQFLVGWITVLDSVPDIDMLGFLPDFLDGLFNMLSDSSHEIRQQADSALSEFLQEIKNSPSVDYGRMAEILVQRASSPDEFTRLTAITWINEFVKLGGDQLVPYYADILGAILPSIADKEEKIRVVARETNEELRNIKAFPTEGFDVGAILSIARRQLSSEHEATRIEALYWISTLLDRHRTEVLIYLDDILDSLLQALSDPSDEVVLLVLDVHACIAIDQQHFRQLVVFQGRIRLNLQDETL

SEQ ID NO: 156 - protein, 253 aa, Cucumis sativus
KRWKFRSATIKNIRLSCCVAGHIKVAEAGEDIQETMDILVDDGLDPMSQEYSYLKYNLLYGGSCSRCGEWCRLPVIAPCRHLLCLDCVALDSEGCTFPGCGKLYVMQTPETLARPENPNPKWPVPKDLIELQPSYKQDNWDPDWQSTSSSKVAYLIERLKDLSETNNEAALLPPSSLTKSGALLQEVDHSRAITSDHEIVRDKVLIFSQFLEHIHVIEQQLTIAGIRFAGMYSPMHASNKMKSLAMFQHDASC

SEQ ID NO: 157 - protein, 355 aa, Cucumis sativus
RPRIRPWKTTKYVEKVQEGGAGLRENEEISSSPERQSPKGSSKKVRFSEDVEIFPLVDDQNSGKTKEDDGLIRGKRFSKEEDEIVKKAVFEYIEKHALGDEGLKMVLHCREYPEIKSCWKDIGKAIPYRPYLSVYYRAHILFERDEKRKWTHEEYELVRKFHDTHGSDWKGLADVLGKHRFHVKDTWRRIKLPNMKKGQWTQDEYQKLFDLVNKDLRLKAYEEKRSKHGMLRDNICWGAISDVLSTRSTALCCQKWYRQLTSPMVAENEWADVDDYRLVDALSSLDAYSIEDVEWDQLLEHRDGDVCRKRWSQMVKHIGDNGNKSFSEQVEVLSQRYSIDVLDAREAYDNAPVVD

SEQ ID NO: 158 - protein, 106 aa, Cucurbita spp
AMRPKLQQSKMKKKKRRRSGEVDSLEQIAGSIRWLAEVVVRSEQARMEMIKDIEKMRAEAEAKRGELDLKRTQIIANTQLEIAKLFASPTNKPLVDHSSPLRIART

SEQ ID NO: 159 - protein, 247 aa, Cucurbita maxima
LHGLKVSQDEEPVAVSIVSSGGYEDDTNDADVLIYSGQGGVNRKDKESTDQKLERGNLALEKSLHRGNEVRVVRGVRDFSNPTGKIYVYDGLYKIQESWVEKGKSGCNVFKYKLVRLPGQREAFLTWKLVQQWKDGNASRIGVIIPDLASGAESLPVSLVNDVDDEKGPAYFTYYAGLKYLKPVCSTEPSAGCNCIGGCLPGNLNCPCMQKNGGYLPYSSNGVLASQQSMIYECGASCQCPPNCRNR

SEQ ID NO: 160 - protein, 208 aa, Cucumis sativus
KRCTKHLARNLSIHSVINILQLARMCDAPDLSLSCMKMVSTHFKAVEKTEGWKFLQKHDSWLELQILQFMDESELRKKRCRRQRKEQRVYLQLSDAMECLEHICKEGCTNVGPLDVVPTKKQPCSKYSTCRGVQLLIKHFATCENRVHGGACWRCKRMWQLLRLHASICHQSDACKVPLCRQFKQKMKQENVEKEDAKWKLLVKKVLS

SEQ ID NO: 161 - protein, 477 aa, Cucurbita spp
GSSVPSSLPSVMRSESIGNQSGFIDSGHSPSQLKLGIRAASAIHPHSLPEHPDGLNNNVHCNSMNAIAGNISLRPPERADSRQLCGVNFNGRSIELNEDVFASGGNRAGPIPGPHYTWGNSYRPQPPAPGVVWPNSPSYMNGISAAHTPTQVHGVPRAASHLMHTVLPMNNHHVGSAPAVNPSIWDRQHAYAGELSKASGFHSGSIGNMNLPNNSPQSMEFFSRIFPQVGGNSVELPIPQRNVGLQSHHQRCMVFPGRGQVLPMMNSFDSSNERGRSRRTEAASNQADKKQYELDIDRILRGEDNRTTLMIKNIPNKYTSKMLLAAIDERHRGTYDFIYLPIDFKNKCNVGYAFINMTDPSLIIPFYEAFNGKKWEKFNSEKVASLAYARIQGKAALIAHFQNSSLMNEEKRCRPILFNTDGPNAGDQVPFPMGVNVRTRPGKARSSNQEENHDEALVISENDENYSTWRRIEGRIR

SEQ ID NO: 162 - protein, 136 aa, Cucurbita maxima
MARTKQTARKSTGGKAPRKQLATKAARKSAPATGGVKKPHRFRPGTVALREIRKYQKSTELLIRKLPFQRLVREIAQDFKTDLRFQSSAVAALQEAAEAYLVGLFEDTNLCAIHAKRVTIMPKDIQLARRIRGERA

SEQ ID NO: 163 - protein, 426 aa, Cucurbita spp
MANQAESSDSKGTKKDFSTAILERKKALNRLVVDEAINDDNSVVALHPDTMEKLQLFRGDTILIKGKKRKDTICIALADDTCDEPKIRMNKVVRSNLRVRLGDVVSVHQCADVKYGKRVHILPVDDTIEGVTGNLFDAYLKPYFLEAYRPLRKGDLFLVRGGMRSVEFKVIETDPAEYCVVAPDTEIFCEGEPVKREDEDRLDEVGYDDVGGVRKQMAQIRELVELPLRHPQLFKSIGVKPPKGILLYGPPGSGKTLIARAVANETGAFFFCINGPEIMSKLAGESESNLRKAFEEAEKNAPSIIFIDEIDSIAPKREKTNGEVERRIVSQLLTLMDGLKSRAHVIVIGATNRPNSIDPALRRFGRFDREIDIGVPDEVGRLEVLRIHSKNMKLAEEVDLKRIAKDTHGYVGADLAALCTEAALQC

SEQ ID NO: 164 - protein, 196 aa, Cucurbita maxima
GDLDPAALKIRPTAVEAVAVNSVFDPHRLLARPGAIEKVLGLIKTTQPKIVTIVEQEANHNGPIFLDRFTEALHYYSNLFDSLEGSSIGFEPANEDVLLSEVYLGRQICNVVACEGTDRVERHESLTQRRTRIESSGFDPVHLGSNAFKQASMLLALFAGGEGYRVEENNGCLMLGWHTRPLIATSAWQLAPDGSK

SEQ ID NO: 165 - protein, 180 aa, Cucurbita maxima
MPRNRDPLVVGRVIGDVVDSFSRSISIRVVYDSREVNNGCELKPSQAVNKPRVEIGGTDLRTFFTLVMVDPDAPSPSDPNLREYLHWLVTDIPATTEATFGQEIVCYENPRPTVGIHRFVLVLFRQLGRQTVYAPGWRQNFNTRHFAELYNLGSPVAAVYFNCQRENGSGGRRRAGDECS

SEQ ID NO: 166 - protein, 270 aa, Cucurbita maxima
  VARIANT (1)...(270): Xaa = Any Amino Acid
VPRDKKILKDIMTEAHDSSYTFHPGSTKMYQDLKGCYWLPGMKKEIADFVSRCLTCQQVKAPRQCSVGLLQPLKVPQWKWEAVCMDLISGLPKTKQSFNVIXVVVDRLTKMAHFIPGKTTYRVDQWAQLYIREIVRLHGVLVSIVSDRDTKFISQFWKSLQKALGTQLKFSTTFHPXMDGQTERLNQTLEDMLRACVMDFAGCWDEHLPLMEFAYNNSYQATIQMAPFEALYGRRCXTLVFWEEVGTXQLLGPELVQATNAAVQKIKQRI

SEQ ID NO: 167 - protein, 236 aa, Cucurbita maxima
KKDGIVCNAALCKLGCEHKISGFIRDEAFDPQKWAIPGDTHEVHQLTEEVLSNGRKVYVRRKRKVKGKRIADVVEALIGAYLSTGGERAAIQFLNRIGIEVYFDIVPYERPFSVDAHKLINVRHLEFLLNYTFNDPSLLLEAMTHGSYMFQEIPRCYQRLEFLGDSVLDYVVTVHLFNKYPGMSPGLLTDMRSASVNNDCYARTAVKAQLYKSILHLSHDLHKHISSTLKNFEMLS

SEQ ID NO: 168 - protein, 234 aa, Cucurbita maxima
EMTSEDIENESKVSNVPGPSSMETDTQKKDQLPQVEPISSEETSTACDDNSDRLELSRLYNEMCKVLDENCKELVHAPSGSHHAASDLKNNLLPLEKIFEDVDRILSSQSNPINEQPMSVSDPQPVVVESPSTDFGLKPSLADPDSERDAVVTEMEIDPAKDSESKKESDRLMPIDLDLIDEKPEPSARVEMAESSSRVPASDDPCPDQPDSTPLPEKRSVVDEMEVEVSKDIA

SEQ ID NO: 169 - protein, 203 aa, Cucurbita moschata
AMRYNDEKNDVHVMAKTLLEKFEEKWLQLLPKVAEEEKRKVEEEVEFQFDMQHAQEATYANMARDISNEISEADMNLKGLREMVIQRCRKMSTEEKRKLGIALTRLSPEDLTKALEIVAENNPNFQATAQEVDLDIDAQNEYTLWRLKVFVKDALAIKSKSAVAIDSIDNDNIDDNKKNNSKGRREICDAVVKSAIKRTKKVV

SEQ ID NO: 170 - protein, 111 aa, Cucurbita moschata
DGLSTLLPDTQANACDIVEDGSFTIDAANYGNIGRFINHSCSPNLYAQNVLYDHEDKRIPHIMFFAAENIPPLQELSYHYNYMIDQVRDSDGNVKKKRCHCGSVECTGWMY

SEQ ID NO: 171 - protein, 133 aa, Cucumis sativus
RFLFPLLTPIRSAIIRRQVYFPDRRLIQFDCGKLQELAILLRKLKSEGHRALIFTQMTKMLDILEAFINLYGYTYIRLDGSTQPEERQTLMQRFNTNPKIFLFILSTRSGGVGINLVGADTVIFYDSDWNPAM

SEQ ID NO: 172 - protein, 128 aa, Cucumis sativus
  VARIANT (1)...(128): Xaa = Any Amino Acid
LALPDFQLPFXIETDASGFGLGAVLSQNKRPIAYFSQRLFETAKERSIYERELMAIVLAVEKWXHYLLGHRFIVYIDQKALRHILEQRKILSGIQKWVMKLIGFDFKIFYRVGPENKAADALSRIPST

SEQ ID NO: 173 - protein, 134 aa, Cucurbita maxima
MAGRGKTLGSGASKKATSRSSKAGLQFPVGRIARFLKAGKYAERVGAGAPVYLAAVLEYLAAEVLELAGNAARDNKKTRVVPRHIQLAVRNDEELSKLLGDVTIANGGVMPNIHNLLLPKKAGSSKASGGEDES

SEQ ID NO: 174 - protein, 203 aa, Cucurbita maxima
IHLYKWKQGVMKEVSEGKLATSADSRCMGAALTKAHTSLLRVLITELQSKVAALVDPNFDSGESKPKRGRKKDVDSATSIRKTKLNLLPLNELTWPELARRYILAVLSMDGNLESAKVTARESGRVFRCLQGDGGVLCGSLTGVAGMESDAFLLAEATNQIYGSLNREKHVITLEEEDSDATGGCEKVLATDGKMPEWAQVLE

SEQ ID NO: 175 - protein, 284 aa, Cucurbita spp
LADYVHRKGLKLGIYSDAGIQTCSKKMPGSLDHEEQDAKTFASWGIDYLKYDNCENTGTSPKERYPKMTKALQQSGRPILFSLCEWGQEDPATWAVNVGNSWRTTSDMEDNWNSMTTIADQNDKWASYAKPGGWNDPDMLEVGNGGMTTAEYRSHFSIWALAKAPLLIGCDIRSMDNITLKLLSNKEVIAVNQDKLGVQGKKVYKLGDLEVWAGTLSGKRVAVVLWNRGFYRAKITASWSAIGLSPSTTVTSRDLWEHSSQVVQHQLTAQVDPHDCKMYVLTPH

SEQ ID NO: 176 - protein, 157 aa, Cucurbita maxima
KCHIKFLETQGIAGVSHHNLLFSKTAPEPVHVLEEEEASFRRNKEFAFGERATSSSSPDPDTDGARFAFNPKNVKLNRFATNASSPSKPTEREIKERINRLSQTLENKVLISRLPDRGERIQKQIVELNLQLSELKRKEHESEVIDITDEFQKVLNV

SEQ ID NO: 177 - protein, 223 aa, Cucurbita maxima
HGKVGRWTRAYHLKVPLPPMPPQPARGGPRQRILPTPRGVNMIIWSLDNRFVLAAIMDCRICVWNASDGSLVHSLTGHTESTYVLDVHPFNPRIAMSAGYDGKTIVWDIWEGTPIRIYEISHFKLVDGKFSSDGTSIILSDDVGQLYILSTGQGESQQDAKYDQFFLGDYRPLIQDPFGNVVDQETQLSTYRRNLQDLLSDSGMIPYPEPYQTAYQQRRLGAM

SEQ ID NO: 178 - protein, 121 aa, Cucurbita moschata
CNEKAAFERPMYAEAYCNMGVIYKNRGDLESAIACYERCLAVSPNFEIAKNNMAIALTDLGTKVKLEGNIAQGVAYYKRALYYNWHYADAMYNLGVAYGEMLKFDMAIVFYELAFHFNPHC

SEQ ID NO: 179 - protein, 206 aa, Cucurbita moschata
QIGFNCCAQVLLRSVLAEKQELCFSVISLLWHKLITAPETQPSVESTSAQQGWRQVVDALCNVVSASPAKAATAIVLQAERQLQPWIAKDDDQGQKMWRINQRITKLIVELMRNHDTPESLVVLASALDLLLRATDGMLVDGEACTLPQLELLEATARAVKPVLEWGESGLSIADGLSNLLKCRLPATVRCLSHPSAHVRALSTSL

SEQ ID NO: 180 - protein, 172 aa, Cucurbita moschata
DTVGAGNTSELEEMDPPSALLCELRPYQKQALHWMIHLEKGKCMDEAATTLHPCWEAYRLIDERELVIYLNSFSGEATTEFPSTLQIARGGILADAMGLGKTIMTISLLLAHSERGGVSNSQLTCSSVEGDDGSMDQSLNPLKKAKITGFEKLQKRNTLASGGNLIICPMSL

SEQ ID NO: 181 - protein, 210 aa, Cucurbita moschata
IPGVHIGDLFFFRMELCVVGLHGQAQAGIDYVPASQSSNGEPIATSVIVSGGDEDDEDSGDTIIYTGHGGQDKFSKQCMHQKLEGGNLALERSMHYGIEVRVIRGMKYAGSVTSKIYVYDGLYRILECWFDVGKSGFGVYKFKLLRIDGQAEMGSSILKFAENLRSKPLSLRPSGYLSLDISMKKEAVPVLLFNDIDNDQEPLYYEYLVG

SEQ ID NO: 182 - protein, 231 aa, Cucumis sativus
RCKQAMGFCLHNNAAVSALAAQAAGAKKVLIVDWDVHHGNGTQEIFEQNKSVLYISLHRHEFGRFYPGTGAADEVGTMGAEGYCVNVPWSRSGVGDNDYIFAFKQVVLPIASAFAPDLTIISAGFDAARGDPLGMCDVTPTGYNLRSISSSATAVIKVLLGESPECDLDDHLPSSAGMKTVLDVLAIQKNFWPVLESSFSKLQSMLEIFATERRGKVKPCKQRRRAVVAPI

SEQ ID NO: 183 - protein, 167 aa, Cucurbita maxima
MGRKKIELKRIEDMCNRHVTFCKRRSGLIKKARELSVLCDVEVGLVIFTNRGRLYEFCSGDSLLNIIKRYQSHFEGRSESQNEVDTKENEESDETLMVSFGKLLQTIQSHVEEPDFKKLNVNDMVHLENQLEASLDKIKSQRVEAMMENSSWIDKMDMAIAMVDSQL

SEQ ID NO: 184 - protein, 198 aa, Cucurbita spp
RSDEEGKFAPSLETLEISRTKIVKSIPNYFGGEDEDGIPDLADIEENDDALATDAATLPLTYQIAHEPDDDNILRTRTYDVSITYDKYYQTPRVWLTGYDESRMLLQPEHVLEDVSQDHARKTVTIEDHPHLPGKHASVHPCRHGAVMKKIIDVLMSRGVEPEVHKYLFLFLKFVASVIPTIEYDYTMDVDLGGPSRR

SEQ ID NO: 185 - DNA, 312 bp, Arabidopsis thaliana
atgtctggtcgtggaaagggaggaaaaggcttgggtaaaggaggagccaagcgtcacaggaaggttctgagagacaacatccaaggaatcaccaagcctgccattcgaagattggctcgtagaggtggagtcaagcgtattagtggtctcatctacgaggagacacgtggcgtcctcaagatctttctcgagaacgtaattcgtgatgctgtcacttacaccgagcacgctaggaggaagactgtgaccgccatggatgttgtctacgctctcaagaggcaaggaaggactctctacggattcggcggttaa

SEQ ID NO: 186 - DNA, 2988 bp, Arabidopsis thaliana
atgagtgcccaaatggaagaaccagagactctcggcaaaagaaaagaatctgaaagttcaaaacttcgttctgatgaaactccgacgccagaaccaagaacgaagcgtagaagtcttaaacgtgcttgtgtacatgaagttgctgttcctaatgattacacaccaacgaaagaagagacgattcatgggacgcttgataatcctgtcttcaatggagacatggccaagacttatccttttaagcttgacccttttcaaagtgtatctgtagcttgtttagagagaaaagaatcgattttggtatctgctcatacttcagctggtaaaactgctgttgctgagtatgctattgcaatggcgtttagagataagcagagagttatttacacttctcctttgaaagctttgagtaatcagaagtatagagagttgcaacatgagtttaaagatgttggtttgatgactggtgatgttactctttcacctaatgctagttgtttggttatgactactgagatcttgagagctatgctttatagaggatctgaagtgttaaaggaggtcgcttgggttatttttgatgagattcattatatgaaggatagagaaagaggagttgtttgggaagagagtattattttcctgcctcctgctattaagatggtattcctttctgcgactatgtcgaatgctactgaatttgcggaatggatatgttatttgcacaagcagccatgtcatgttgtgtacacagattttaggccaacacctctgcagcattatgcttttcctatgggtgggggtggactgtaccttgtggttgatgataatgagcagtttcgggaggatagtttcgttaagatgcaggatactttccccaaaccgaaatctaatgatgggaaaaagagtgcgaatggcaaatctggtggtaggggtgctaaaggtggaggtggccctggtgattctgatgtttacaaaattgtaaagatgatcatggagagaaaatttgaaccagtcattatcttcagcttcagtagaagagagtgtgaacagcatgcattgtcaatgtcaaaactcgattttaatacagatgaagagaaagaagttgtggaacaggtgtttaataatgcaatgcagtgcttgaatgaagaggatagatccttacctgccattgaactgatgttgccactgctccaacgtggtattgctgtccatcattctggtcttcttcctgtcatcaaggaattagtggagcttctttttcaggaaggacttgtgaaagcgctttttgccacagaaacctttgctatgggtttgaatatgcccgccaaaactgtagtgtttactgctgttaagaagtgggatggtgacagccatcgttacattgggtctggtgaatatatccagatgagcggcagggctggacgtcgtggaaaggacgagcgtggcatctgcattattatgattgatgaacagatggagatgaatacactcagggacatgatgttgggaaaaccagcccctttgcttagtacttttaggctgagttactacacaattttgaatctattgagtcgtgccgaaggacaatttactgctgagcatgttataaggcactcgttccatcaattccagcatgaaaaggctttaccggatattgggaataaggtgtccaaacttgaagaggaagctgccattcttaacgcttctggagaggcggaggttgctgaataccataatctacaatttgacattgctaaacatgaaaagaaacttatgtcagaaataattaggcctgaaagggtgctttgttttcttgatactggtcggctggttaaaataagagaaggtggaacggattggggctggggagttgtcgttaatgttgtaaaaaattcttcagttggaactggttccgcctcttcacatggtggcggatatatagtggatactctacttcattgctctactggttttagtgaaaatggcgcaaagccaaagccatgtcctccccgtgctggggaaaagggtgaaatgcatgtggttcctgttcagctacccttaatttctgctttgagcagactaaggatatcagttccttctgatcttcggccagtggaagcaagacagagtatactacttgcattacaggagttgtcaagtcgcttccctctagggttcccaaaactccatccagtcaaggatatgaatattcaagacacagagatagtggatctggtcagccaaatcgaagaagttgagcagaagttacttgctcatccgatgcacaagtctgaagatgatcaacaaatcaagagtttccagaggaaagcggaggtgaattatgaaattcaacagctaaaatcgaaaatgcgtgattcccagctccaaaagtttcgagatgagcttaagaaccgatctcgggtattaaagaaacttggacacattgatgctgatggtgtcgtccaggtaaagggacgagctgcgtgcttgatagacacaggggatgaattgcttgtcactgaactgatgtttaatggtacttttaatgatctggatcatcaccaagtagcagcccttgcaagctgtttcattcctgttgataaatcaaacgaacaggtaaatttaaggaatgaacttaccaaaccattgcagcagctccaagatagtgcacggaaaatagcagagatacaacatgaatgcaaactggaaattgacgtggaagagtatgtggaatccaccatcaggcctttcctgatggatgttatctactcttggtcaaagggcgcaagctttgcagagattatacaaatgactgacatattcgaaggtagtatcatcagaagtgctagaagactcgacgagtttttgaaccagcttcgagctgcagcagaggcagttggtgaaagcagtttagagagcaagtttgcagctgctagcgagagcttgcgacgaggtattatgtttgcaaattcgctttacttgtaa

SEQ ID NO: 187 - DNA, 3591 bp, Arabidopsis thaliana
atggggtcagagggaaatatgaagaagtcggttgtgacacaagtaagcattggtggatttggggaatccactactgcaaaacaactcacagattaccttgaagatgaagtaggaattgtttggcgttgcagattaaaaacttcgtggactcctcctgggtcttatcctaattttgaaatcgcagacacttcaaatatccccagtattgatgaatataagaaagtggagcctcatgcctttgtccatttcgcagtttttgaatcagctggtcgtgccatggatgctgcagggcaatgcaacctcatcttggatggccagccgttaaaagtcagtttgggtcctaagaatccatattcccttaatcaaagaagaagaacgactgtaccttataagttggctggtattacacttgagattgggacattggtttctcgggatgatttttttgtttcttggagagctgaaggggttgatttcctggtggatccttttgacaacacgtgcaagttttgtttcagaaagagcactgccttctctttcaaggatgcagtgatgcatgctgtgatcaattgtgattataagttggagttattggtgagagatatacaaacagtcaggcagtataaaaccttgcatggctttgtgcttattttgcagctggcttcttcaccccgtgtctggtacagaactgctgatgatgatatttacgatactgtccctggcgatctcttggatgatgatgatccttggatccgtaccactgattttactcaagttggggcaattggtcgatgtcattcatatcgagtgctcatatctccgcggtatgaaaataaactgagaacagccttagattattttaggatgcggagggtgcaagaggaacgtgtgaggtggcctccccgtatccgtaatgagccttgttttggggagcctgtgtcagatcatttcttctgcattcatcacaaggaaggaatctcttttgagatcatgtttctagtaaattcggtattgcacaggggtgtctttaaccagtttcagttgactgagcgattctttgatcttctaagaaaccaacccaaggacgtcaatatagcttctctcaagcatctctgtacctataaacgaccagtttttgatgcgtacaagaggttgaagcttgttcaggaatggattcagaaaaatccaaagcttttagggagtcatgaacaatctgaggatatctctgagatcagaagactagtaattaccccaaccagagcctattgcctacccccagaagttgagctctccaacagggtactcaggagatacaaagctgttgctgaaagatttttgcgggtaactttcatggatgaaagtatgcagaccataaattcgaatgttctctcttactttgttgctcctattgtgaaggatttgacatcaagttctttctcccagaagacctacgtttttaaaagagtgaagagcatattaaccgatgggtttaaactatgtggtagaaaatacagttttctagcattctcagccaatcaactgagagaccgctctgcatggttctttgctgaagacgggaaaacacgtgtgtcagatataaaaacatggatggggaagttcaaagacaagaatgtggcaaaatgtgctgctaggatgggcctgtgcttctcctccacatatgccactgtagatgtcatgcctcacgaggttgacactgaggttccagatattgagagaaatgggtatgttttctctgacggaattggtacaatcacacctgacctcgctgacgaagtaatggagaaacttaagttggatgtgcactacagcccttgtgcttatcagatacgttacgcaggtttcaaaggggttgttgctcgttggccatcaaaaagtgatggaatcaggctagcccttcgagacagtatgaagaagttcttttccaaacatacgatcttggagatctgttcctggacgaggtttcaacctgggttcttaaatcggcagataattacccttctatccgtactaggtgttccggatgaaatattctgggatatgcaggaatccatgctctataaactgaaccgcatccttgatgatacagatgtggcatttgaagttctcacggcatcatgtgctgaacagggaaacactgcagctatcatgcttagtgcaggtttcaaaccaaaaaccgagccgcatctacgcgggatgttgtcttcagtcagaattgcacaactctggggtctcagagaaaaatctcgtatttttgttacttcaggaaggtggctaatgggttgcctagacgaagcagggatacttgaacatggccaatgctttattcaagtctctaaaccgtctatagaaaattgtttctccaaacatgggtctcgttttaaggagacaaagacagatctggaagtagttaaaggctatgtagccattgctaagaatccttgtcttcacccaggggatgtaaggattttagaagctgttgatgtaccccagctgcatcacatgtatgactgccttattttccctcagaaaggtgataggccgcatacaaacgaagcttctggcagtgaccttgacggggacctgtactttgtggcttgggatcagaaactcatccctcccaacaggaaaagctatccggccatgcattatgatgcagctgaagagaagagtttaggccgtgctgtcaaccaccaggacataatcgatttctttgcaagaaacttggcgaatgagcagttgggcacaatttgcaatgcacacgtcgttcatgctgatagaagtgagtatggagccatggacgaagaatgtttgctactggcagaactagctgccactgcagttgatttcccaaagacagggaaaattgtgtcaatgcccttccacctaaaaccaaaactctacccagatttcatgggaaaagaagactaccaaacttacaagtcgaacaaaatcttgggtcggctttacagacgggtaaaagaggtttatgatgaagatgcagaagcttcctcagaagaaagcacagacccaagtgccatcccttatgacgctgttcttgaaataccgggatttgaagatttgatccctgaggcatggggtcacaaatgtttgtacgacgggcaactcattggtcttcttgggcaatacaaggtgcagaaagaggaagagattgtgacgggtcacatctggtccatgcccaaatacacaagcaagaaacaaggcgaactgaaagaaagactgaagcattcttataattcccttaaaaaggagttcaggaaagtatttgaggaaacaatccctgaccatgaaaatctcagcgaggaggaaaaaaacatcttgtatgagaagaaggcttcagcttggtatcatgtaacttaccatcccgagtgggtgaagaagtctttagagctgcaagatccagatgagtccagtcatgcggcgatgctgagttttgcttggattgcagctgattatcttgcaagaatcaaaatccggtcacgggaaatgggaagtatcgactcagccaagcctgttgattctttggctaagtttcttgctcagcgtctctaa

SEQ ID NO: 188 - DNA, 2232 bp, Arabidopsis thaliana
atgtcagacgctctttctgcgattccggccgcagttcatcgcaatctctccgataaactctatgagaagcgcaaaaatgctgcgcttgagcttgagaatattgtgaagaatctaacttcttcgggtgatcatgacaagatctcgaaagtcattgagatgttgattaaggaatttgccaaatctcctcaagctaatcatcggaagggtggtctaattggcttagctgctgtaactgttggtttgtctacagaagctgctcaatatcttgagcaaatagtgccacctgtgattaattccttttctgatcaagatagccgagttcggtactatgcatgtgaagctctctataacattgcaaaggttgtgcgaggcgatttcattattttcttcaataagatatttgatgccttatgcaaactctcagcagattctgatgccaatgtccaaagtgctgctcatcttttggatcgccttgttaaggatattgtgacggaaagtgatcagttcagtattgaggaattcatacctcttttaaaagagcgaatgaacgttctcaacccttacgtccggcaatttctggttggatggatcactgttcttgatagtgttccagacattgacatgcttgggtttctgccagactttctcgatgggttattcaatatgttgagcgactctagtcatgaaatacgacagcaagctgattcagctctttcagagtttcttcaagagataaaaaattcaccatctgtagattatggtcgcatggctgaaatactggtgcagagggctgcttctcctgatgaattcactcgattaacagccatcacgtggataaacgagttcgtaaaacttgggggagaccagctcgtgcgttattatgctgacattcttggggctatcttgccttgcatatctgacaaagaagagaaaatcagggtggttgctcgtgaaaccaatgaagaacttcgttcaatccatgttgaaccctcagatggttttgatgttggcgcaattctctctgttgcaaggaggcagctatcaagtgagtttgaggctactcggattgaagcattgaattggatatcaacacttttaaacaagcatcgtactgaggtcttgtgcttcctgaatgacatatttgacacccttctaaaagcactatctgattcttctgatgacgtggtgctcttggttctggaggttcatgctggtgtagcaaaagatccacaacactttcgccagctcatcgtatttcttgtccacaatttccgagctgataattctcttttggaaaggcgcggtgcccttattgtccgaagaatgtgtgtacttttggatgccgaaagagtctaccgagagctctctacaattcttgagggagaagataatcttgactttgcttctaccatggttcaggcattgaatttgattttgcttacttccccggagttatcgaaactgagagaactattaaaaggttcactcgtcaatcgcgaagggaaagaacttttcgttgccttgtatacttcatggtgccattcacccatggcaattataagcctctgcttattagctcaggcttaccagcatgcgagtgtcgtgattcaatcattggtagaagaagacattaacgtcaaatttctagtacagcttgataaattgatccggcttctggaaactccaatctttacttaccttagattgcagcttctggaaccaggaaggtacacatggttgctgaaaacactttatggtcttcttatgttacttcctcagcaaagtgcggcgttcaagatacttaggacaagactcaaaactgtgccaacgtactcattcagtactggaaaccaaataggcagagcaacttcaggagttcctttctctcagtataagcatcaaaacgaggacggtgacttagaagacgataacatcaacagttctcaccaaggaatcaattttgctgtgcggctacaacagttcgaaaacgtacagaatctacatcgtggccaggcaaggactagagtgaactactcatatcactcttcctcttcttctacatcaaaggaggtgaggagatctgaagaacaacaacagcagcagcagcaacaacaacagcaacaacaacaacaacaacgaccaccaccttcttcgacatcatcatcagttgcagataacaatagacctccatcaagaacttcaagaaaaggccctggtcaattacagctttaa

SEQ ID NO: 189 - DNA, 2589 bp, Arabidopsis thaliana
atggctcagtttcttcgacgcttctcttcctctcccatggcgaacgaagacgaattccaatctccggtggaaccatcacagcagcaatctcaggactgtgtttcggagtcttatctgatagggtttgttatcgcgaacatagtagggttaaagtactattccggccgaatcaacggtcgagagatggtgggtctggttcgagaacccttgaacgtatatgacaataatgcaatcagagtactcaacacgcgatctgagcaagtgggtcacatcgagcgtacagtagcagccgttctcgcgccgatgattgattctcacacgatcgtcgtcgagggtattgtacccaatactcgttctaactccaataggtacagaatcccttgtcaaattcatgtatttgcaaagttagaagcgtcctctactgtgaaatcgacgatttctagaggtgggttagtattgatttcggagtcagatacatcgtttgggttatctgaggctgttgtggttaaggaacagatgggaaatggagataagaggagtgttgataagatttttaaacttgttgatgagaatgtgaagttaatggggaaattggtagcggctgagccacctagggaagtgataaagtctgaactttttgctcatcagaaggaaggattaggctggttactccatagagagaaatctggagaattgcctccgttttgggaggagaaagatggagaatttttgaatactttgacgaattaccgctcggataagcggcctgatcctttgcgtggaggggtgtttgctgatgatatggggttgggtaagacccttactttgctttccctgatagcttttgatagatatggcaatgcatccaccagtacgccaaccgaagagcctttggatggtgaaggagacaagattgaaaagaagggtaaaaagagaggaagaggcaagagcagtgaaagtgtaactcgaaagaagcttaaaactgatgatgttgttggcatgaatgtgtctcaaaagacaacgttgatcgtttgtccaccttctgtgatttcagcatggataacacagttagaggagcatactgtaccgggaatcttgaaggtgtatatgtatcatggtggcgaaaggacagacgatgttaatgagcttatgaagtatgacatagtgttgactacttacggcactttagctgttgaggaatcgtgggaagattctcctgtaaagaaaatggagtggctgagaataattcttgatgaggcacacaccattaagaatgcaaatgctcaacagagccgagtagtttgtaagttgaaggcttcccgcagatgggctgtcacaggaactcctattcagaatggttcatttgatttgtactctttgatggcctttctccggtttgagccattttcgattaagagttattggcaaagtttgatacaacgcccgcttggccaagggaataaaaagggtctttcacgtctgcaggttttaatggcgacaatttcgttaagaagaacaaaagaaaagagtttgattggtttaccgcctaagactgttgaaacttgttatgttgagctttctccggaagaacgtcagttatatgatcacatggaaggagaagcgaaaggtgttgtgcagaatcttataaataatggaagcttgatgcgcaactactcaacagttttgagtataatcttacggcttagacagctttgcgatgacatgtctctatgccctccagaattaagatcttttaccacttctacatctgtagaagatgtgactgataagccagagctactgcaaaagctggttgcagcattgcaagatggcgaagattttgactgtccaatctgcatttcgccaccaacaaacatcatcatcactcgatgtgcccacatcttttgcagggcttgtatccttcaaactcttcaaagaagtaaaccattgtgccctctttgccgtggctcccttacccaatctgatctctacaatgctccgcctcctcctccggattcttccaataccgatggagaagacgctaaatcttcaaccaaatcctcaaaggtctcagctttactatccctgctcatggcatcgagacaagaaaaccccaacacaaagtctgttgtgttctctcaattcaggaagatgctgcttttactagaaactccactaaaagctgcgggtttcaccatcttgcgcttggatggagcaatgactgtgaagaaacggacccaagtcattggagaatttgggaatccagagttaaccggacctgtggtgttgcttgcgagcctcaaggcctctggtactggcataaacctaactgcagcctcaagggtttacttgtttgacccgtggtggaaccctgcagttgaagaacaggccatggacaggattcataggatcgggcagaaacaagaggttaaaatgataaggatgattgcgagaaacagtatcgaagagagggtccttgagcttcagcagaagaagaagaatctagcaaacgaagcttttaaaagaaggcaaaagaaagatgaaagagaggttaacgttgaagacgtggttgctctcatgtctctctga

SEQ ID NO: 190 - DNA, 1767 bp, Arabidopsis thaliana
atggctgaggagaagaagaataagaagaaaaagagtgacgctaaggttgattctgaagaaaccggtgaagaattcatttccgagcacagttctatgaaggataaggaaaagaagaggaagaagaataagcgagagaataaggatggttttactggagaagatatggagataactgggcgtgaaagtgagaaactaggtgatgaggtttttatagttaagaagaagaagaagtcgaagaagccaataaggattgattctgaagctgttgatgctgtgaagaagaaatcgaaaaagagaagtaaggagacaaaggctgattccgaagctgaggatgatggtgtggagaagaaatccaaggagaaaagtaaggagacaaaggttgattctgaagctcatgatggtgtgaagaggaagaagaagaagagcaagaaagaatctggtggtgatgtgatagaaaatactgaaagctccaaagtatctgataagaaaaagggaaaaagaaagcgggatgatactgatttgggagctgaagaaaacatagacaaggaggtgaagaggaagaacaacaagaagaaaccaagtgtggattcagatgttgaagatatcaatttggactctacaaatgatggaaagaagaaaaggaagaaaaagaaacaaagtgaggattcagagactgaagaaaacggcttgaactctaccaaagacgcaaagaagagaaggaagaagaagaagaagaagaagcaaagtgaagtctctgaggctgaagaaaagtctgataaaagtgatgaagacttgaccaccccatctacatcaagtaaaagggtgaagttttctgaccaagtggagttttttcctagtgatgatgatgaaggaacggaagatgatgatgaagaagaagttaaggtggtgaggggtaagcggtttacaaaagaagaagatgagatggtaaagaatgctgtattagaatacattgataaccatgctttaggagatgaggggataaagatggttatggaatgcaaggcatacccacaacttaaaggctgttggaaagaaattacatctgctttaccttggaggacttataatagtgtgtatcatcgtgcacatactatatttgaagcaggatctcaggggatatggacgaaagaggatattgaactcgttatggagtttcaaaagacacacgggaatgattggaaaacacttgcagatgcaatgggtaagcacaggaagcatgtgaaagacgcttggaggagaggaagattggcaggtaagaagaaaggacattggatgagggaggagtatcaaaacctctttgaccttgtcaacaaagaccttagaatgaaagcattcaaagagaaacactcaaaacatggtatgctcaaagataacatcccttggatggctataagcgacgtacttgaaacacgggaccacgtgacttgctgccagaaatggtatgagcagttgatatcaccaatggtagcaaagggaatgtgggctaacgttgatgactataggctcttggaagagcttttgaaactggatgctgcttgtatcgacgatgtggattgggataatcttttggagaatcgagatggagaagcttgtagaaaacggtggaaccagatgatcattcatatcggcgtaccgaaatcgaaaacatttgcagaacaagttgagattttgtctgacaggtattgccctgacatagctgaggacagagaggattttgacaacagaccctatgatcctgaagattaa

SEQ ID NO: 191 - DNA, 891 bp, Arabidopsis thaliana
atggagaacggagaatctaaccaagaaaatctcaaatctctcaaccacgacgaatcgcttaagaagccatctgcttcctccgtcgttgtagataggttaaaacgtgatgaatggagcgaaggagctgtttcgactttactcgaagcttatgagtcaaaatgggttctcagaaacagagccaagcttaagggacaagactgggaagacgtggctaaacacgtgtcctcacgcgccactcacaccaagtcaccaaagactcagactcagtgcaagaacaagatcgagtccatgaagaaacggtaccgttctgagtccgctactgctgatggctcctcttggcctctttatcctcgtcttgatcatctcctacgtggaactcagcctcagcctcagcctcaagctgttctgcctctgaattgctctgttcctctgctcttacttgagccgccgttgcctgcggtggctcatccgccgcagatttcttacggatccaacggcgtcggcaagattcctaaggaagacggattcaagccggagaacaaaccggaaaaagatgcggagatggatacagacagtagtacgcctgtggttaaaacgaaggtgagagggaagaaagtgaagagaagatataaagaagagaaggaagagatcgccggaagtatacggtggttagcggaggtggtgatgagatcagagagagcaagaatggagacgatgaaagagatagagagaatgagagctgaagctgaagctaagagaggagaattggatttgaaacggacggagataatggcgaatactcagctagagattgctagaatctttgctgctgcagcttcttctggacagaacaaaggtgttgattcttcattaaggatcggaagaaattga

SEQ ID NO: 192 - DNA, 2010 bp, Arabidopsis thaliana
atgcaaggagttcctggatttaatactgttccaaatcctaaccattatgacaaatcaatagtgttagatattaaaccgttgcgaagtttgaaacctgtttttccaaatggtaatcaaggtccaccttttgttggttgtccaccttttggtccttcctcatctgagtattcttctttcttcccatttggagcacaacaaccaacgcatgatactccagatctcaaccaaactcagaacacgcctattccatcatttgttccacctcttcgatcgtatagaacacctactaaaacaaatggccccagcagctccagtggaactaaaagaggtgttggtcgacctaagggaactactagtgtgaagaaaaaagagaagaagactgtggccaatgagcctaacttagatgttcaggtagtgaaaaaattcagttcagattttgacagtgggatcagtgcagcagagcgagaagatggaaatgcgtacttagtaagtagtgtattgatgcgttttgatgcagttaggaggcggctcagccaagtagaattcacaaagtccgctacttctaaagcagcaggtactctgatgagcaatggggtgcggacaaacatgaagaagagagttgggacggttcctggaattgaggttggagatatcttcttttcccggatagagatgtgtttagtgggtcttcacatgcagactatggctggcattgactatataattagtaaggccggttcagatgaagagtctttagcaactagcattgtttcatctggacgttatgaaggtgaagctcaggatcctgagtcattaatttacagtggacaaggcggcaatgcagacaagaacagacaagcatctgatcagaagcttgaaaggggtaatctagcattagagaatagcttgaggaagggaaatggagtaagagtcgtaagaggggaggaggatgcagcttcgaaaacaggaaagatctatatctatgatgggctttattcgatctcagagtcatgggtagagaaagggaaatctggttgcaacacctttaaatataaattggtgagacaacctggtcaaccacctgcgtttggcttttggaaatctgttcagaagtggaaggaaggtttgactacaagaccaggcctgatccttccagatctcacctcaggagctgaaagtaaacctgtttcacttgtgaatgatgttgatgaggataaagggcctgcttattttacctatacctcctctctgaaatactcagagacctttaaactaactcagcctgtaattggttgttcctgcagtggttcatgttcaccaggaaatcataactgctcttgtatcagaaaaaatgatggtgatctcccttaccttaatggggttatactcgtttcccggaggcctgtgatatatgaatgtggcccaacgtgtccttgtcatgccagttgcaaaaacagagtgattcagacaggactgaaatcccgcctggaagtgtttaagacaagaaaccgcggttggggtttacgttcgtgggattccttacgtgctggttctttcatatgtgaatatgctggtgaagtcaaagacaatggcaaccttagaggaaaccaagaagaggatgcgtatgtctttgacacatcgcgtgtttttaactcgtttaagtggaattatgagcctgagcttgtagatgaagacccttcaactgaagttcccgaagagtttaatctcccatcaccactcctaatcagtgccaagaaatttggcaatgtagctcggttcatgaaccatagttgctctcctaacgttttttggcagccagttattcgtgaaggaaacggtgaatcagttatccacattgctttctttgccatgcgtcatatccctcctatggcagaattgacatatgattatgggatttctcctacatccgaggccagagatgagagccttttacatggacagaggacatgtctctgtggatctgagcaatgtcgtggttcattcggatga

SEQ ID NO: 193 - DNA, 5121 bp, Arabidopsis thaliana
atgaatgttcaggctcacatgtctggtcaacggtctgggcaggttccaaaccaagggacagtgccgcagaataatggaaactctcaaatgcagaatttagttggtagtaatggtgctgctactgctgttactggtgctggtgctgctactggttctggtactggtgtaaggccttcacgtaacatcgttggtgccatggatcatgatattatgaaacttcgacagtacatgcaaactcttgtgtttaacatgttacagcaacggcaaccatctccagctgatgctgcatcaaaggcaaagtatatggatgttgctagacgtttagaagaagggctgtttaagatggctgtcacaaaggaggattacatgaaccggtcaacccttgaatctcgtattacaagcctaataaaaggaagacagataaataactacaatcagcgacatgctaattcttcttcagttggaacgatgatacctactccaggattatcacagactgcgggtaatcctaatttgatggttacatcctctgttgatgctactatagttggcaacaccaacatcacaagcactgctttgaacactggaaaccctctaattgctggtggcatgcatggaggtaatatgtctaatggatatcagcactcgtcgagaaacttttctcttggttctggagggagcatgacatccatgggtgctcaaagaagtacagcccaaatgattcctacacctggcttcgttaacagtgttactaacaacaacagtggtggattttctgctgagcccacaattgttcctcagtctcagcaacaacaacaaaggcaacatactggtggtcaaaacagtcacatgttgtccaaccatatggctgctggcgttagacccgacatgcaatcaaagccgtcgggtgcggccaacagctctgtaaatggtgatgttggagcgaacgaaaaaattgtagactcaggttcatcttacaccaatgcgtccaaaaaattacagcagggtaacttctctcttctttccttctgtccggatgatctcatttcaggtcagcatattgaaagcacgtttcatatttcaggggaaggttatagcacaacaaatcctgaccccttcgatggagctataacatcggctgggacagggacaaaggctcataatatcaatacagcaagtttccagcctgtgtccagagttaactcttctctgtcacatcaacaacaatttcagcaaccgcctaatcgatttcagcaacaaccaaatcagattcaacagcagcagcagcaatttctcaatcagaggaaattgaagcagcagactccgcagcaacatagattaataagcaatgatggcttggggaaaactcaagtggattcagacatggttacgaaggtgaaatgtgaacctggaatggagaacaagagtcaggctccacagtcccaagcatctgaacgattccagctttctcagctccagaatcaatatcagaactctggagaagactgccaagcagacgctcagcttctcccagtcgaaagtcagagtgatatatgtacatcactcccccaaaatagccagcagattcagcaaatgatgcacccgcagaatataggttctgattctagtaacagttttagcaatcttgctgttggagtaaaatcagaatccagtccacagggtcaatggccttccaagtctcaggaaaatactctaatgtctaatgctatttcaagtggaaagcacattcaggaggatttccgtcaaagaattaccggaatggatgaagctcaacctaataatttgactgaagggtctgttattggtcaaaatcatacttctactatatcggaatcccataatctgcaaaattctattggtaccacatgtagatatggaaacgtaagtcacgatcccaagttcaaaaatcaacaaagatggctactgtttctacgtcatgcacggagttgcaaaccgccaggagggagatgccaagatcaaaattgcgtaacagttcagaaactatggagtcacatggacaattgtgctgatcctcagtgtttgtatccccgctgtcgtcacacaaaggcattgattggccactataaaaactgcaaggatcctcggtgccccgtctgtgtgccagtgaagacttatcagcaacaagctaatgttcgtgccctggcccgtttaaaaaacgaaagcagtgctgtgggctcagtgaatagatctgtagtatcaaatgattcactaagcgctaatgctggagcggtttctggtacccctcgttgtgctgatactttagataatttgcaaccttcattaaagcggttgaaggtggagcaatcttttcaaccagtggtccctaagactgaaagttgtaaaagctccattgtttctacaacagaggcagacttatctcaggatgctgaaagaaaggatcataggccattgaagtcagagaccatggaagtgaaagtggaaattcctgataattctgttcaagcaggattcggcatcaaagaaacgaaaagtgaaccttttgaaaatgttcccaagcctaagcctgtcagtgaaccaggtaaacatggtttatctggtgactcgccaaagcaagaaaacatcaaaatgaagaaagagcctggatggccgaagaaagagcctggatgtccaaagaaagaagaactggtggagtctcctgaacttacctcaaaatctagaaaaccaaagataaagggtgtttctttaactgaattgtttactccggaacaagtgagagaacatatccgtggtcttcgtcagtgggttggccagagtaaagccaaagcagaaaagaatcaggcaatggagaattcaatgagtgagaattcctgccagttatgtgcggtggagaagcttacatttgagccaccacctatttattgtactccttgtggtgctcgtatcaaaaggaatgcgatgtactatactgttggaggtggtgaaactcgtcattacttttgtattccctgttataatgaatcccgaggagacactattctcgctgaagggacttccatgccaaaggcaaaactcgagaaaaagaaaaacgatgaagagattgaagaatcgtgggtccaatgtgataaatgtcaggcctggcagcatcaaatatgtgctctatttaatgggcggaggaatgatggggggcaagctgagtatacctgcccatattgctatgtaattgatgtggagcaaaatgagagaaagcctttacttcagagtgctgttcttggagcgaaagatctgccaagaacaattctcagtgaccatatagagcagcggttgtttaaaaggctgaagcaggaaaggactgagagagccagggttcaaggaacaagttatgatgagattccaactgttgaatcccttgtggttagagttgtttcatctgttgacaagaagctagaagttaaatctcgatttcttgaaatttttcgggaggataattttccgacagaatttccatacaagtccaaggtggttctgctgttccagaagatagaaggtgtagaagtatgcttgtttgggatgtatgtccaagaatttggatccgaatgttcaaatcccaatcaacgccgtgtttatctctcgtatttggattctgtgaagtactttagacctgatatcaagtctgctaatggggaggctctgcgcactttcgtttaccacgaaattcttattggttatctggaatactgcaaattgcgtggtttcacgagctgctacatatgggcttgtccaccactgaagggtgaggattatatcctatattgccatccagaaattcagaaaacaccaaagtctgataaactacgggaatggtacttagcaatgttgagaaaagctgcaaaggaaggaattgttgcggaaactacaaatctatatgaccattttttcttgcaaactggtgaatgtagagctaaggttacagcagctagactcccgtacttcgatggtgactactggccaggtgcagcagaggatatcatatcccaaatgagtcaagaagatgatggtagaaagggaaataaaaaaggaatactcaagaaacccattacaaagagggctcttaaagcatctggccagtcggatttctctgggaatgcttccaaagacctgctactaatgcataaacttggtgagaccattcatccaatgaaggaggattttatcatggttcacttgcagcatagttgcacacattgctgtacgctgatggtaactggaaatcgttgggtttgcagccaatgcaaagatttccagttatgtgatggatgttatgaggctgagcagaaacgagaagacagagaaagacatcctgttaatcagaaagataaacataatatttttcctgttgagatcgccgatattcctacggatactaaggacagagatgagatacttgaaagtgaattctttgatacaaggcaagcattcctgagtctatgtcaagggaaccattatcagtatgatacactgaggcgggcaaaacattcttccatgatggtgctttatcatctgcataatcctactgctcctgcctttgtgacaacatgtaacgtatgtcacctcgatattgaaagtggtctaggctggcgctgtgaagtttgcccagactatgatgtgtgcaatgcttgttacaagaaagagggttgtattaatcatcctcataagttaacaactcatccatctctagctgatcaaaacgctcagaataaagaagctaggcaattgcgagtcttgcagctcaggaaaatgctcgatcttctggtgcatgcgtcgcaatgccgttctccagtttgtctatatcccaactgccgcaaagtgaaggggctattccgacatggtctccgctgcaaagtacgtgcttcaggaggttgtgttctatgcaagaaaatgtggtatctgttgcaactccacgctcgggcctgcaaggaatccgagtgtgatgtacctcgatgcggggacctaaaggaacatctgagaaggttacaacagcaatcagattctaggcggagagctgccgtcatggagatgatgagacagagagctgcagaagtcgctggaacctcgggttga

SEQ ID NO: 194 - DNA, 2748 bp, Arabidopsis thaliana
atgccgtctgatataatggaacagagaggtgtttcaacaccttcccactttcatgaagatattcatattacttcagagaggcaatttgggtttatgaaaacagacatgatgcctgaaaaccaaggtggtcgtgatagactttcaagtatgccaaagagttcctggacatctgaaagttaccagctgaagccacaatctagtttttctgggtcgcacccctctggtagccctaacgcaagaaacactacaaatggtagtcagtgggaaagcagtttattttccagctcaatgtctgatttatttagtagaaagctgcggctacagggaagtgatatgctatccactatgtctgcaaacacagttgttacccaccgtgaagaagaaccgtctgaatctttggaagagattgaggcacaaactattggaaatcttctcccagatgaagatgatctttttgcagaagtgacaggtgaggttgggcgtaaatctcgtgctaatacaggagatgagttggatgagtttgacctcttcagcagtgttggtggcatggaactagatggagatattttttcttctgtgagtcatagaaatggtgagagaggtggcaataattctgttggcgagcttaaccgtggggaaattccatccagaacacttttggtcggaaatatcagtagcaatgttgaagactatgagctgaaggtcctttttgagcaatttggagacatccaggctcttcatacagcttgcaaaaatcgtggctttatcatggtatcgtactgtgatataagggctgctcagaatgcggcgagagcactccagaataagctgttaagaggaacaaaacttgacattcgttattctatctctaaggaaaatccttcacaaaaagatacaagtaaaggagccttgttggttaataatctcgattcttctatttcgaatcaagagctgaatcgactggtcaaatcgtatggagaggtcaaagagattcgtaggaccatgcatgataactcacagatatacatagagttctttgacgttcgagctgcagcagctgctcttggtggactaaatggacttgaggttgctgggaagaagcttcaacttgtgccgacctatccagagggtacaagatacacgtcgcagtgtgctgcaaatgatactgaagggtgtctacctaaaacgtcttatagtaatacatcatcgggacacataggtagacatttcccaggaatgatttcttcaacctccagtgatggtggatctatgcgggttatacataattctattggatcacctgtgaattccttcattgaacgacatcgtagtctcagcattcctattggattcccaccttcggcaaacggcatctcagcaagtaagcctgtaggacttcaggagcatggccaccattttgataattcaaatatggggatccaaagcatgccaaatctccatcctcattctttttcggagtacgtcgacaactttgcaaatggtagtccatatacgtcctctgcattttctgaaatggtcagtgatggctcaaaagcaaatgaaggctttatgatacataatgttcgtggagtggaaggctttagtggaggcggtataggatctcccatgcatcaaagctctcgccgccctattaatttatggagcaactctaacactcagcaacaaaatccgtcaagtggcatgatgtggcctaactcgccatctcacatcaacagcattcctactcagcgcccacctgttactgtattctctagagcacctcctataatggtgaatatggcatcttcccctgtgcaccaccacattggatctgcgccggtattaaattctcctttctgggacagaagacaagcctatgtagctgaatctctagaatcatctggcttccacataggttctcatggtagcatggggattcctggctcttcaccatcacatccaatggacattggttctcataagactttctctgttggtgggaatcgcatggatgtaaattcccaaaatgctgtcctgcgatctcctcaacagttatctcatctctttcctggaaggagtccaatgggttcgatgccagggtcatttgactcgccaaatgaacgatacaggaatctctctcaccgaagaagcgaatctagctctagcaatgctgacaaaaaactgtatgagcttgacgttgaccgtatattacgtggggaggacaggaggacaacattgatgattaaaaacattcctaacaagtacacttcgaagatgcttctatctgctattgacgagcattgtaaaggaacttatgatttcctttatttgccaattgacttcaagaacaaatgcaatgtgggatatgctttcatcaatcttattgaacctgaaaagattgtcccattttttaaggcatttaatggcaaaaagtgggaaaagttcaatagcgagaaggtggcaacgcttacgtatgctcgtatccaagggaaaacagctcttattgcccatttccagaactcaagcttaatgaacgaagacaaacgttgccgacctattctcttccacactgatggtccaaatgctggtgatcaggaaccatttccaatgggaagcaacatacggtcaagaccaggcaagccacgaagcagtagcattgacaactacaacagctttagcatctcttccgtttctgaaaaccgagaagaaactcctaatggaactgatccgttcttgaaggagaactaa

SEQ ID NO: 195 - DNA, 411 bp, Arabidopsis thaliana
atggctcgtaccaagcaaaccgcaaggaaatccaccggaggaaaagccccaaggaaacaactcgcaacaaaggcggcgaggaaatcagctccggcgaccggaggagtaaagaagccacacagattccgtcctggaactgttgccctaagagaaatcaggaagtatcagaagagcactgagcttctgatccgcaagcttccgttccagcgtttggttcgtgagatcgctcaggatttcaaaacagatctgcgtttccagagcagcgccgtcgcagcacttcaggaagcggctgaagcatacctcgttggattgtttgaagacaccaatctttgcgcgattcatgctaagagagtcactatcatgcctaaggatattcaattggcgaggagaattagaggcgagagggcttaa

SEQ ID NO: 196 - DNA, 3633 bp, Arabidopsis thaliana
atgcatcccaagcgatcaagtcaaggagatggttcagttactaagccagttagaaccagtgataggcttaggaggaggcccaaattgcatggtcgctcatacttgtactactcttcaccaaacatgttacataatcggaaaagaaacacaaagacaagaacggcagcctctcagatcgcaaagatgctgcacaaaggaaaccgtccagcgagggcatcaaatgccgcgccaattgcatctgatctccggcgttccacgaggaagagaagaatttctgtaaacctggaggactatacagacagttctggagcggaggatgaggatatgatgagtccagcatatcgaactttgaggaggagagttcataaaaacttctcaacttcaaaaagtagaaaggacatggatgctgaattggcaccacgtcgtgagggtctccgtcctcgtcgttcaacaacaattgctaataaacgactgaaaacagaatctggcgctgaccaagatacatcagaagagaaagatggccaagatgaaactgagaatgggaatgaattagatgatgcggatgatggtgaaaatgaggttgaggctgaagacgagggtaatggagaagatgaaggcgatggcgaagatgagggagaagaagatggtgatgatgatgaagagggtgatgaagaacaagagggaaggaagagatatgatctgcgaaaccgtgctgaagtccggagaatgcctacgggagaaatcaacaagcaacaacaacctagatctcctcggagagtattgcatcagggcatgggcaccagggttggaagagatggtaggagaggtgggtctcggcctcacaagcgccatcgctttacaagaacagatgattcagatgattctcttcttgtggacgagttggaccagggccctgcaattccctgggctcgaggtggaaacagatctggagcaccttggctatttgggggtttggacacgtatgggtcaagttcattggggttgaacgttggagcttctggttggggtcaccagagtgatggtttggctgcattaacttctggtgttcagactgctggcccaagctctaaaggaggtgcagatatccagccactgcagattaatgaggatataaattttgatgacattggtgggctgtccgaatacattaatgatttgaaggaaatggttttctttccgttgctgtatccagagttctttgcaagttacagcattactcctcccagaggtgtactgctgtgtggtcctccaggcactggtaaaacactgattgctcgagcattagcatgtgctgcttcaaaagctggacagaaagttagcttttatatgcggaagggtgctgatgttcttagtaagtgggttggcgaggctgagagacagctaaagctactctttgaggaggctcagcgaaaccagccttccataatcttttttgatgaaattgatggtcttgctcctgtaagatctagcaagcaggaacaaatacataattctattgtttcaactttactggcgctgatggatggcctcgattctcgtggtcaagttgttctcattggagcaacaaacagggtagatgcaatagacggagctttacgccgccctggcagattcgatcgggagtttaatttttccttaccaggttgcgaagcacgagccgaaatattggatattcacactcgtaaatggaagcacccacctactagggagctgaaagaggaactggcagctacttgtgtagggtattgtggtgctgatctaaaagctttgtgcactgaagctgcgattcgtgcttttcgtgagaaatatccacaagtttataccagtgatgataaatacgccatagatgttgggttggttaatgttgaaaagagccactttgtagaggcaatgtcagctattactcctgctgcccatagagggtctgttgtgcaatccagaccactctctccggttgtgttgccatgtttacatcgacacctccttgaatccatgagtttaatatcagatatttttccctcgtcagccacgtcatcggagttgacgaagctgtcaatacttacatttggatctgcaattcctcttgtttatcgacctcgacttttgctgcttggtggtgaaggagttggactggatcatcttgggcctgcaattttacatgagctagaaaagttccctattcattctctgggacttccatctctcctttcggatcctggtgcaaagaccccagaagaagcgttagtacatatatttagtgaagctagaagaacaacaccttcaatactttacataccaatgttcaataattggtgggaaaatgctcatgaacagcttagggctgtatttctgactttgttagaagaattgccatcaaatctacccatattattacttgctacatcttatggtgaattgtctgacatggaagagcagtcagtatttgacaatcgatctgtctatactgtggacaaaccatcaagtgaagacaggtctttgttctttgaccgtttgattgaagctgctctctcagtcatttctggcttaaatggcaaacctgatggaccacaaccccttccagaacttcccaaggttccaaaagaacctactggtccaaaacccgcagaagtaaaagccaaggtggaagcagagcagcatgcccttcggcgattgcgtatgtgtctcagagatgtttgcaatagaatactatatgataaaagattcagcgcattccactttccagttactgacgaggatgctccaaactatcgctcaataattcaaattccaatggatacggctactctgctgcagcgtgttgatactgggcagtatctgacatgtacaccgtttttgcaagatgtggatctcattgtgagaaatgccaaggcttacaatggagatgattacgctggagcgagaattgtcagtagagcctatgagcttcgagatgtagtgcatgggatgctgtcacagatggacccagcactgctaacatattgtgataagatcgcagctgaaggtggtccttcactgataccagatgatctgagtggatcaatcctcggtttagctcctgttgtgcagatgggaactgttactagaaccagtgccagacttcgaaatgtgcagccagaggttaatttagatcgagattatgaaggtcttaaaaagcccaagaaaactactgatgctgtcagtatagattcagctgcagacaaatcacagaaccaagattcaggccaagaaatgccatctccggatgcggccaacccacagtcagcagctccttctccaacagatggtgatagagaagaccaaagcgagccaccaagtaaagaggcatctgcagaagatatgagtggtgattcttgcaagggtcctgcggccaagtcggataaagaaatttcaagccgaacagaatctgtaaagggagtattcatggaacgtactgacaactacagcattccgcagatggagaggctttacactcgaatcatgaagggtgttcttgagactctggacaaagggcttcgtgatgatgataataatcctaagcattcaattttgagatttttgtcggaattcgcacagcatcaggcgaatttctga

SEQ ID NO: 197 - DNA, 1602 bp, Arabidopsis thaliana
atgaagagagatcatcatcatcatcatcatcaagataagaagactatgatgatgaatgaagaagacgacggtaacggcatggatgagcttctagctgttcttggttacaaggttaggtcatccgaaatggctgatgttgctcagaaactcgagcagcttgaagttatgatgtctaatgttcaagaagacgatctttctcaactcgctactgagactgttcactataatccggcggagctttacacgtggcttgattctatgctcaccgaccttaatcctccgtcgtctaacgccgagtacgatcttaaagctattcccggtgacgcgattctcaatcagttcgctatcgattcggcttcttcgtctaaccaaggcggcggaggagatacgtatactacaaacaagcggttgaaatgctcaaacggcgtcgtggaaaccactacagcgacggctgagtcaactcggcatgttgtcctggttgactcgcaggagaacggtgtgcgtctcgttcacgcgcttttggcttgcgctgaagctgttcagaaagagaatctgactgtagcggaagctctggtgaagcaaatcggattcttagccgtttctcaaatcggagcgatgagaaaagtcgctacttacttcgccgaagctctcgcgcggcggatttaccgtctctctccgtcgcagagtccaatcgaccactctctctccgatactcttcagatgcacttctacgagacttgtccttatctcaagttcgctcacttcacggcgaatcaagcgattctcgaagcttttcaagggaagaaaagagttcatgtcattgatttctctatgagtcaaggtcttcaatggccggcgcttatgcaggctcttgcgcttcgacctggtggtcctcctgttttccggttaaccggaattggtccaccggcaccggataatttcgattatcttcatgaagttgggtgtaagctggctcatttagctgaggcgattcacgttgagtttgagtacagaggatttgtggctaacactttagctgatcttgatgcttcgatgcttgagcttagaccaagtgagattgaatctgttgcggttaactctgttttcgagcttcacaagctcttgggacgacctggtgcgatcgataaggttcttggtgtggtgaatcagattaaaccggagattttcactgtggttgagcaggaatcgaaccataatagtccgattttcttagatcggtttactgagtcgttgcattattactcgacgttgtttgactcgttggaaggtgtaccgagtggtcaagacaaggtcatgtcggaggtttacttgggtaaacagatctgcaacgttgtggcttgtgatggacctgaccgagttgagcgtcatgaaacgttgagtcagtggaggaaccggttcgggtctgctgggtttgcggctgcacatattggttcgaatgcgtttaagcaagcgagtatgcttttggctctgttcaacggcggtgagggttatcgggtggaggagagtgacggctgtctcatgttgggttggcacacacgaccgctcatagccacctcggcttggaaactctccaccaattag

SEQ ID NO: 198 - DNA, 528 bp, Arabidopsis thaliana
atgtctataaatataagagaccctcttatagtaagcagagttgttggagacgttcttgatccgtttaatagatcaatcactctaaaggttacttatggccaaagagaggtgactaatggcttggatctaaggccttctcaggttcaaaacaagccaagagttgagattggtggagaagacctcaggaacttctatactttggttatggtggatccagatgttccaagtcctagcaaccctcacctccgagaatatctccattggttggtgactgatatccctgctacaactggaacaacctttggcaatgagattgtgtgttacgaaaatccaagtcccactgcaggaattcatcgtgtcgtgtttatattgtttcgacagcttggcaggcaaacagtgtatgcaccagggtggcgccagaacttcaacactcgcgagtttgctgagatctacaatctcggccttcccgtggccgcagttttctacaattgtcagagggagagtggctgcggaggaagaagactttag

SEQ ID NO: 199 - DNA, 4488 bp, Arabidopsis thaliana
atggcagacgaggaagaaggagaaaacagcaacaaactaatgcttgttgctctcactgcaacaatgactaagttactcgatgctaggctggaagctttcaggcaagagcatatcaattctgacccagatagagatcgaactagaagagagcctagagatcctgtagacgatagagacacaatgagttactatagtcaatcctctagacagaccaaccatagaaggaggaggcatgacagagaagaaagagttctacctagagatgatcttgccggcttgaagatacgtattccttctttcaaaggaaccaacgaccctgatgagtatctagaatgggaaaagaagattgagctcgtgttcaattgccaacaatatactgaagaaagcaaagtgaaagtggcaccaaccgaatttcagaattacgccttgagttggtgggatcaattggttaccacaaggagacgtgctggagactatccaattgagtcctggactcaaatgaagaccataatgaggaagagattcgtgccaagtcactactacagagagctacacaacagattgagaaatcttgtccaaggaaacaaatccgtagaggagtactacaaagagatggaaaccttgatgttaagagctgatattcaggaggataatgaagccataatgtctaggttcatgggaggtctaaacagagatatcatagacagattggaggttcagcactatgtggagttagaggagctactgcacaaagcaatcatgtttgaaaaacagctgaagagaaggagctctaagcctagttttggttcaggaaagcctagctaccacaaggatgaacgatcaggatttcagaaagattataagcctttcatcaaaccaaaagttgaggatcaagatcagaaaggaaagggcaaagctgttatgacaagaactagagacatcaagggctttaagtgtcagggacatggtcattatgctagtgagtgttcaaacaagaggatcatgataatcaaagacactggtgagatagagtcagaggatgagcaactagaagagagttcatcaacagaagactatgaagcaccatcaaaaggagagctattggttacaatgaaagctttgagtgtgatagccaaaacggatgaacaagagcagcgagagaacctgtttcattcaagttgtatggtcaatgacaaggtctgtagcttgatcatagatggcggaagttgcaccaacgttgctagtgaaaccatggtggagaagcttggtctaaaagttatgaagcatccaaggccatacaagttgcaatggttgaatgaggatggagagatgagcgtggacagacaagtgaaggtaccattatctattggcaagtatgaggacgaaattttgtgtgacatactgcctatggaagctagtcacatactacttggaagaccatggcaatcggaccgtaaggattatactgatgtgtttccagaggagaatccagtaggcttaccacccattagaggcattgagcaccaaattgactttgttccaggagcgtctttgccaaacagaccggcttataggaccaatcccgtggagactaaggagctagaaaagcaagtgactgagctgatggagagaggccatattcgtgagagtatgagtccctgtgcagtacctgtgttgcttgtacctaagaaggatggaagctggaggatgtgtgttgattgcagagccatcaacaatataacagtgaagtatcgccatcctatacctagattagatgatatgttagacgaattgcatggttctagcatcttttctaaggttgatttaaaaagtgggtatcatcaaattaggatgaaagaaggcgatgaatggaaaactgcatttaaaactatacaaggtttatatgaatggttagtgatgccattcgggctgacaaatgcacctagtacattcatgagactgatgaatcatgttcttagagcttttataggacgttttgttattgtttattttgatgacatcctagtttacagcaagagtctagaagaacatgttgaacatttgaaaatggttttagaagtacttaggaaggaaaagctttatgccaatcttaagaaatgtacttttggaacagataaccttgtcttcttaggttttgttgtgagtacagatggagttaaagttgacgaagagaaggtgaaggcaattcgagaatggccaagtcctaaatctgtaggggaagtgaggagcttccatggacttgctggtttctataggaggtttgtgaaggactttagcactctagcagctccactgaccgaagttattaagaaaaatgttggattcaagtgggaacaagctcaagaagatgctttccaggccctaaaagagaagcttactcatgcccctgttttatcacttcctgattttcttaaaacttttgaaattgaatgtgatgcctccggggtaggaattggtgttgtcttaatgcaggataagaagccaatagcttatttcagtgaaaagcttggaggagctactctcaactatcctacctatgacaaagaactttatgctttagtaagggcattacaaacggggcaacattacctctggcctaaggagtttgtcattcacacagaccatgagtccttgaagcatcttaaaggacaacagaaactcaacaagaggcatgcaaggtgggttgaattcattgagacatttccttatgtcatcaaatataagaaaggtaaggacaatgtagttgctgatgcattgtcaaggaggtatgttcttctctcatctcttgatgctaagttacttggttttgagcatataaaatctctttatgcaaatgattctgattttgaaaagatatattcatcttgtgaaaagtttgcatttggaaaatattatagacatgacgggttcttgttttatgataaccgtttgtgtattcctaattcgtctttgagagagctgtttataagggaagcacatggtggaggcttaatgggacactttggagtctcaaaaactattaaagtaatgcaagatcactttcactggccgcatatgaaaagagacgtggagagaatatgtgaaaggtgtcccacatgtaaacaagctaaggctaagtcacaaccccacggtttgtatactcctcttcctattccttcgcatccttggaatgatatttctatggactttgtagtaggtttgccaaggaccaggacaggtaaggactcgatttttgtggttgttgatagattttctaaaatggcacatttcatcccttgtcataaaactgatgatgccatacatatagccaatctgttctttagggaagttgttcgtttgcatggcatgcctaagaccatagtatcagatagagacactaagtttcttagttatttttggaaaactctttggtctaagctaggaactaagttgttgttttctactacttgtcatccacaaactgatgggcaaactgaggtcgttaataggacattgtctacactcttgcgtgcattgattaaaaagaatctaaagacttgggaggactgtctacctcatgttgaatttgcatataatcactctatgcattctgcctctaaattttcgccttttcaaatcgtttatgggttcaatcctactactcctttggatttaatgcctttgcctttgagtgaaagagtcagtctagatggaaagaagaaggcagaattggtgcaacagattcatgagcaggccaagaagaacattgaagagaaaacaaaacagtatgctaagcacgccaacaagagtagaaaggaagtcatcttcaacgagggagacttggtttggattcatctccgaaaagaacgttttcctaaagagagaaagtccaaacttatgtcgaggatagacggaccctttaaagtgctcaagaggatcaacaacaatgcctactctttggatttgcaaggtaagtataatgtgagtaatagttttaatgttgctgacctttttccttttattgcagacaacacagatttgaggtcaaatccttttcaactgggagaggatgatgtgataatgacaagcttggatcatggagctgatgagataatgacaagcttggatcatggagctgatgagataatgacaagcttggatcatggagatgatgtgataatgacaagcttggatcatggagctaaggagcagtttgaaggagggaaagttatcaaccactcgatcaagcatgctgttgaagatttgagggagcttgaatctaatgactcgatggactactcgacccaacatgaagatgaactgcttggagctacaaaaaaggaagcaatgcatgttcttaatggtccaatgacaagatcgaagactagactactaaatcaagatatcactacacttctacaacacattgagggcagtcttaaacaagatgcttgtcaaaccacgttggttgtgattcaagcggtttaa

SEQ ID NO: 200 - DNA, 3879 bp, Arabidopsis thaliana
atggatgctgatgcgatggaaactgagaccactgatcaagtctctgcttctcctctacattttgccagaagttatcaggtagaggcacttgagaaagctatcaagcagaacactattgtcttcttggagactggttctggcaagacccttattgctattatgcttcttcgtagctatgcctaccttttccgcaagccttcaccatgcttctgtgtcttcttggttcctcaagtggttcttgtcactcagcaagcagaagccctgaagatgcatactgatctaaaagttggtatgtattggggagacatgggggtggacttttgggattcttcaacatggaaacaagaagttgataaatatgaggttctggtgatgacccctgccattttgctcgacgcgttgaggcatagttttctgagcttgagcatgatcaaggttctaatagttgatgagtgtcatcatgcagggggaaagcacccttatgcttgtatcatgagggagttctatcataaggagttaaattctggaacttccaatgttccacggatatttgggatgactgcttcacttgtctatacctgtgagaatgagtctgtgctggctgggtttgtccccttttctacaccaagcttcaagtattaccagcacataaaaataccaagtcccaaacgagcaagcttggtagagaagctagaaagactaacgataaagcatcgcttatcccttggaaccttggatctcaactcctctactgttgattctgtagagaagagactgttgaggataagttcaactctaacatattgtttggatgatctcggaattttgctggcccagaaggctgctcagtcattgtcagccagtcagaatgactctttcttgtggggcgaactaaatatgtttagcgtggccttggtaaaaaaattctgctctgatgcttcacaggagtttttggctgagatacctcaaggtcttaattggagtgttgcaaacataaatggaaatgcggaggcaggtctcctaactttaaaaactgtctgcctcattgagactcttcttggttatagctccttggagaacatacggtgcatcatttttgtggatagggtgataacagccatcgttctggaatcccttttggctgagattcttccaaactgtaataactggaaaaccaagtacgttgcaggaaataactctggtctgcaaaatcaaactcggaagaagcaaaatgaaattgtggaagacttccggagaggcttggttaacatcattgtagcaacatctattctagaggagggtctagatgttcaaagttgcaacctggttatcagatttgaccctgcatccaacatttgcagtttcatacagtctcgtgggcgtgctagaatgcaaaattcagattatttgatgatggtggaaagaatgcgcgaagagtctttggatcattctcttgttccctgtccacctcttccagatgattcagatgaaccactcttccgtgtcgaaagtactggagcaactgtaactcttagctcaagcgtcagcttaatatatcattactgctcaaggcttccttcagatgagtacttcaaaccagcccctagatttgatgtaaacaaggatcaggggagttgcaccctttaccttcctaagagttgcccagtaaaagaagttaaagctgaagcaaataataaagtgttaaaacaagctgtctgtcttaaagcttgcattcaactgcacaaagttggagctctaagtgatcatcttgtgcctgacatggttgtggcggaaactgtctcacaaaaactcggcaccagagttgtgcttgaagatgacattgggaacacaagcttccggttggaagatcataggggtacaatagctgtgacattgagttatgtgggagcttttcaccttacacaagaagaggtccttttctgtagaagatttcagataactctattccgagttcttttagatcacagtgtggaaaatttgatggaggcattgaatggattgcatctcagagatggggtggcacttgattatctactagttccatccactcattcacatgaaacatctcttattgattgggaagtgatcagatccgtgaatctaacttctcatgaggttttggaaaaacacgaaaattgttctaccaacggtgcttctcgcattctacacacaaaagacggcttgttttgtacttgtgtcgtacaaaatgcattggtttacacaccacataatggatacgtctactgcacaaaaggtgttctcaacaatctaaacggaaattcattattgaccaagagaaattctggcgatcagacttacattgagtactacgaggaaaggcatgggattcaattaaattttgtggatgaacctcttctaaatggaagacacattttcacgttgcatagttatcttcacatggccaagaagaagaaggagaaagagcatgacagggaatttgttgaactacctcctgagctttgtcatgtcattttgtccccaatatcagttgatatgatctattcatatacttttatcccatctgttatgcaacgcattgaatctttgcttatagcatacaacctgaagaaaagcatcccaaaagtcaatattccaaccattaaggttttggaagctattacgacaaagaagtgcgaagatcagttccacttggaatcactagaaactcttggtgactcttttctgaaatatgctgtttgtcagcaactattccaacactgtcatactcaccatgagggtcttcttagcacgaagaaagatggaatgatttcaaatgtcatgctctgccaatttggatgtcagcagaaacttcagggatttatccgcgatgagtgttttgaacccaaaggttggatggttccaggtcaatcatctgcagcttattcacttgtaaacgatactctacccgagtctagaaacatatacgttgctagtaggaggaatctgaaacgcaagagtgtggccgatgttgtagaatcattaattggagcatatctcagcgagggaggtgaacttgcagctttgatgttcatgaattgggttggaataaaggtcgactttacaactacgaagatccagagagattccccaatacaagcagagaagcttgtgaatgtaggttatatggagtcgctgttgaattacagttttgaggataagtctcttctagttgaagcattgactcatggttcatacatgatgcctgaaattccaagatgctatcagcggttggagttcctcggtgactctgtattggattatctcataaccaagcatctatacgacaaatatccttgtctgtcccctggactattaaccgacatgcgatcagcttctgttaacaatgaatgttatgccctagtggcggtgaaagcaaacctgcacaaacacatcctgtacgcctctcatcatctccataagcacatctctagaactgtcagtgagtttgaacagtcttctttgcaatccactttcggatgggaatccgatatatcttttccaaaggttcttggagatgtgatagaatctctagcaggcgcgatatttgttgactcaggttacaacaaggaagtagtgtttgcaagtattaaaccacttttgggttgtatgataactccagagactgtcaagttgcatcctgtgagagagttgacagaattatgtcagaagtggcagttcgagttgagtaaagctaaagatttcgattctttcacggttgaggtgaaagctaaggagatgagttttgctcacacagcaaaggcctctgataagaaaatggccaagaaattggcttacaaagaagtcttgaacttacttaagaacagcctggactactaa

SEQ ID NO: 201 - DNA, 4155 bp, Arabidopsis thaliana
atgagtagtttggtggagaggcttcgcatacgatctgataggaaaccagtttataacctagatgattctgatgatgacgacttcgttcctaaaaaagatcgaacctttgagcaagtcgaggctattgtcagaactgatgcgaaagaaaatgcatgtcaggcttgtggggaaagtactaatcttgtaagctgcaatacatgcacttatgcgttccatgctaaatgcttagttccacctcttaaagatgcttccgtggaaaattggagatgccctgaatgtgttagtcctcttaacgagatagataagatattggattgtgaaatgcgtcctacaaaatctagtgaacaaggttcctccgatgcggaaccgaagccaatttttgtgaaacagtatctcgtgaagtggaagggattatcataccttcactgctcttgggtgcctgagaaggagttccagaaggcttataagtcaaatcatcgtttaaaaaccagagtgaacaattttcaccgtcaaatggagtcattcaataacagcgaagatgattttgttgccatacgtcctgagtggaccactgttgatcggattcttgcctgcagagaggaagatggggagctggaatatcttgtcaaatataaagagctatcctatgatgaatgttattgggagtcagaatcagacatctcaaccttccagaatgaaattcaaaggttcaaggatgtaaattctagaactcgcagaagtaaagatgttgaccataaaagaaatcccagagactttcaacagtttgatcatactcctgaattcctcaaaggcttgttacatccataccagcttgagggacttaattttttgcggttctcgtggtcaaaacagacgcatgtaatccttgctgatgaaatgggactaggcaagacaattcaaagcattgcccttttagcttcactttttgaggagaacctcattccgcatttggtaattgctcctctatcgactctgcgtaactgggagagagagtttgccacatgggccccacagatgaacgtggttatgtattttggcactgcgcaagctcgagcagttatcagagaacatgagttttacttatcgaaagatcaaaaaaagatcaagaaaaagaaatctggacaaataagtagcgaaagcaagcaaaaaagaatcaagtttgatgtcctcctcacatcgtatgagatgatcaacctagattcagcagttctaaaaccaattaagtgggagtgcatgattgttgatgaaggtcatcgactgaaaaataaggattcaaagctgttctcttcattgacacagtattcaagtaaccaccgtattcttctgacaggaacaccacttcagaacaacttggatgaacttttcatgctcatgcattttcttgatgcggggaagtttggaagtttggaggagttccaggaggagttcaaagatattaatcaagaggagcagatctcaaggttgcacaaaatgttggctccacatttgctcagaagggtaaaaaaagacgtaatgaaagacatgccccccaaaaaggagctcattttgcgtgttgatctgagcagtctgcagaaagaatattacaaagctatttttacccgtaattatcaagtattgacaaaaaagggaggtgctcaaatttcccttaataacattatgatggaattacgaaaagtatgctgccatccttatatgctagagggtgttgagccagttattcacgacgcaaatgaagctttcaaacaacttttggagtcttgtggaaagctgcaacttctagataaaatgatggtcaaactgaaagagcaaggacacagagtcctaatatacacacagtttcagcatatgctggacttacttgaagactactgtacccataagaaatggcagtacgagcgaattgatggaaaggttggcggagctgagcggcaaatacgcatagatcggttcaatgccaaaaattctaacaagttttgttttttgctctccacaagagctggtggcttaggaataaatcttgcaacggctgatacagtaatcatttatgacagtgactggaatcctcatgctgatcttcaagcaatggctagagctcatcgacttggccaaacaaataaggtgatgatttataggctcataaaccgaggcaccattgaagaaaggatgatgcaattgactaaaaagaaaatggttctagagcatcttgttgttgggaaactcaaaacacaaaacattaatcaggaagagttagatgacatcatcaggtatggatcaaaggagctttttgctagtgaagatgatgaagcaggaaagtctggaaaaattcattatgatgatgcggctatagacaaattgcttgatcgtgatctcgtggaggcagaggaagtctcagtggatgatgaagaggagaatggattcttaaaggctttcaaggtggctaattttgaatatatagatgaaaatgaggcagcagcattagaggcacagagagtcgctgctgaaagcaaatcttcagcaggcaattctgatagagcaagttattgggaagagttgttaaaagataaatttgagctgcaccaggctgaggagcttaatgctcttggaaaaaggaagagaagtcgcaagcagttggtatccattgaagaagatgatcttgctggtttggaagatgtgagctctgatggagatgaaagttatgaagctgagtcaacagatggtgaagcagcaggacaaggagttcagacgggtcgacggccgtacagaagaaagggtcgcgataatttggaaccaactccgttgatggaaggtgaggggagatctttcagagtactgggtttcaaccagagtcaaagggccatttttgtacagactttgatgaggtatggagctggcaattttgattggaaggagtttgttcctcgcttaaagcagaagacctttgaagaaataaatgaatatggaatactcttcttgaagcacattgctgaagaaatagacgagaattctccaaccttttcagatggtgtgcccaaggaaggacttagaatagaagatgttctagtcagaattgctcttctgatactagttcaggagaaggtgaaatttgtagaagatcatccagggaaacctgttttcccctctcgcattcttgaaagattccccggactgagaagtggaaaaatttggaaggaggaacatgacaagataatgatacgtgctgttttaaagcatgggtacggacggtggcaagctattgttgatgacaaagagttggggatccaagagcttatctgcaaagaattgaatttccctcacataagtttgtctgctgctgaacaagctggtttgcaggggcagaatggtagtgggggctctaatccgggagcacagactaaccagaatcctggaagcgttattactgggaacaataatgcttctgctgatggggctcaagtaaactcgatgttctattatcgggacatgcagagacgacttgttgagtttgtgaaaaagcgagttctgcttttggagaaggcgatgaattatgaatacgcagaggaatattatggacttggtggctcatcatctatccctactgaagaaccagaagctgaaccaaagatcgctgacacagtgggagtgagctttattgaggttgatgatgaaatgcttgatggacttcctaagactgatcctatcacttcagaagaaattatgggggctgctgttgacaacaaccaagcgcgggtcgaaatagctcaacattataaccagatgtgcaaacttcttgatgagaacgctcgggaatcagtccaagcatatgtaaacaaccaaccaccgagtaccaaggtgaatgagagcttccgtgcactcaaatctatcaatggtaacattaacacaatcctttcgattacatctgatcaatccaagtcacatgaagacgacaccaagccagacctaaacaatgttgagatgaaggacacggccgaagaaacaaaaccgttaagaggtggcgtcgtcgatctgaatgtggtggagggagaggagaacattgctgaagctagtggaagtgttgatgtaaaaatggaagaagccaaagaagaagagaagccaaagaacatggtcgttgattga

SEQ ID NO: 202 - DNA, 1203 bp, Arabidopsis thaliana
atgtctgtacatgtcaaggaagaacctgtgcttgttccaaactgcgatgtcgagaatacagagcttgcagttttcaatggaaatggagaaagtgagcttgagaattttgggacttgcgtagatgagataacagatagagtgaatcagcttgagcaaaaagttgtggaggtcgaacacttttactctacaaaagatggagctgctcaaactaacacttctaagagtaactcgggcgggaagaagatcgctatttctcaaccaaacaactcgaagggtaactcggccgggaaagaaaaatcaaagggaaaacatgtttccagccctgaccttatgcgtcaatttgcaacaatgtttcgtcagattgctcaacataaatgggcatggccgttcttggagcctgttgatgttaaaggacttggactacatgattattacaaggttatagagaagccaatggacttgggaacaattaaaaaaaaaatggagagttcggagtatagcaatgtcagggagatatatgccgatgttagactagttttcaagaacgcgatgagatacaatgaagaaaaagaagatgtttatgtgatggctgaatctcttctggagaaatttgaggagaaatggctcctgataatgcctaaacttgtggaggaggaaaagaaacaagtagacgaagaagcggagaagcatgccaataagcagcttacaatggaggctgcacaagcggaaatggctagggatttaagcaacgaactatatgagattgatctgcagctggagaaactccgggaatcagtagttcagagatgcagggttcgtaaccgagtttttggtgtggttttggaaataaacagaaaactgtccactcaagaaaagaaaggactttctgcagctctaggtcgtctctcacctgaggatctgtctaaggcgttaaaaatggtttcagagagcaacccgagtttcccggctggagcaccagaagtcgagcttgacattgatgttcagactgacgttacattgtggagactgaaggtgtttgtgcaagaagcattgaaagcagctaacaaaagctctggaggaacaaacgctcaaaacaataacaatactggaactggagagatcaacaagaacaatgcaaaaagacggagagagatctctgatgcaatcaataaagcttcaattaaaagagctaagaaagcttga

SEQ ID NO: 203 - DNA, 2385 bp, Arabidopsis thaliana
atggtacattcagagtcatcaatacttagttccttgcgcggtggtgatggcggtggtattccttgttctaaggatgaactagcaataaatggtagttacaccgatcctatggggcggaggaagtccaagcggtttaaggttgctgcggaaagtgagttttcacctgattttggatcgattaccaggcagctcagatcgagaagaatgcagaaggagttcacagttgagacttacgagaccaggaatgtttctgatgtttgtgttctctcttctcaagctgatgttgagttgattcctggagaaattgttgcagaaagagatagctttaagtcggttgattgtaatgacatgtcggttgggttaaccgaaggagctgaatctcttggagttaacatgcaagaacctatgaaagataggaatatgccagagaacacaagtgagcaaaatatggtggaggtccatcctccaagcataagcctgccagaggaagatatgatggggtctgtttgcaggaaaagcatcactggaacaaaggagcttcacggaagaacgatctctgttgggagagacttatctccaaatatggggagcaagttttcaaagaatggaaagaccgctaaacgttctatatcggtggaagaggaaaacttggttctggagaagtcagattctggagaccatttgggtccatcaccagaggttttggaacttgagaaatcagaggtttggataattacagacaaaggggttgtaatgccttcaccagtgaagccttccgagaagaggaatggagattatggtgaaggatctatgaggaagaatagtgagagggttgccctggataaaaagagattagctagtaaatttcggttatcaaatggtgggcttcctagttgctcaagcagtggggatagtgctcggtataaagttaaggaaacaatgcgtcttttccatgaaacttgtaaaaaaattatgcaagaggaagaagcaaggcctaggaaaagagatggtggcaatttcaaagtggtttgcgaggcttcgaaaattctcaagagtaaagggaaaaatctttatagtggtactcagattattggaactgtgcctggtgttgaggttggcgatgaatttcaatatagaatggagctgaaccttcttggtatacatagaccaagtcaaagtggtatcgactatatgaaagatgacggtggggaactagttgccacgagtattgtatcctcgggaggttataatgacgtgcttgataactctgatgtcttgatctacacgggtcaaggcggaaatgtggggaaaaagaaaaataatgaaccacccaaagaccagcagcttgtaacgggaaaccttgcgttgaaaaacagtataaacaaaaagaaccctgtgcgggtcataagaggcatcaaaaatacgacattacaatcatcagttgttgcaaagaattatgtttacgatggattgtatctggtggaagagtactgggaagaaaccgggtctcacggtaaactcgtcttcaagttcaaactacggcgtattcctggacaacccgagcttccctggaaagaggttgcgaaatcgaaaaaatctgagttccgggatggtctttgcaatgttgatatcacagaagggaaagagacattacccatatgcgctgtgaacaatttagacgatgagaaaccgccaccgtttatctacacggctaaaatgatatatccggattggtgccggccaattcctccaaagagctgcggttgcacaaacggctgctccaagtcaaaaaactgtgcctgcattgtgaaaaacggtggaaagataccttattacgatggagccattgttgaaattaagcccctggtctatgagtgtggcccacactgcaaatgcccaccttcttgcaacatgagagtctcacagcacgggatcaagatcaagctggagatcttcaaaacggagtcaagaggttggggagtgagatcgctggaatctattcctatcgggagcttcatctgtgagtacgcaggagagcttctagaggataaacaagctgaaagccttaccgggaaagatgagtatctttttgatctcggggacgaggatgatccgttcaccataaacgcagcacagaaagggaacatagggaggtttataaaccatagctgctcgccgaatctgtacgcacaggacgtattgtacgaccatgaggaaataagaatacctcacattatgttctttgcactggacaatatacctccacttcaggaactctcgtacgactacaattataagatcgatcaggtatacgactctaatggtaatatcaagaagaaattttgctattgtggttccgctgagtgtagtggtaggctctactaa

SEQ ID NO: 204 - DNA, 6135 bp, Arabidopsis thaliana
atggcgtctaaaggtggtaaatctaaacctgatatagtaatggcgtccaagagtgggaaatctaaacctgataatgaatccagagctaagcgtcagaagacgctcgaagctcctaaagaaccacgtcgtcctaaaactcactgggaccatgtattggaggagatggcttggctgtcaaaggactttgagtctgagaggaaatggaagctggcgcaggcgaagaaggttgctttgagagccagcaaaggaatgctagatcaggcatctagggaagaaaggaagctaaaggaagaagaacagcgacttcggaaagtagccctcaatatctcgaaagacatgaaaaagttttggatgaaagttgagaagctggtgctttacaagcatcagttggtacgcaatgagaagaagaagaaggctatggacaagcaacttgaatttctgttaggccaaactgagaggtactcaaccatgttggcagaaaatttagtggagccttataaacagggccaaaatactccttcaaaacctctactaactatcgaatcaaaaagtgatgaggagagggcagaacagatacctccagagataaattcttgtcttgaatcaggaagtcctgaactcgatgaggattatgatctaaaatctgaggatgagaccgatgaaaaacacttcaccaaacgtgaaagacaggaagagttggaagctttgcaaaatgaagtggatctaccagttgaggagctgctcagacgttatacctctggaagagttagccgagaaaccagcccagtaaaagatgaaaatgaggacaatctgacctcagttagccgagtaaccagcccagtaaaagatgaaaatcaggacaatctggcctcagtaggtcaagatcatggagaggacaagaacaatcttgcagcttctgaagaaactgaagggaacccaagtgttcgtcgttctaatgatagctatggtcatttggcaatatccgagacccattcacatgaccttgagccaggcatgacgactgcatctgtgaagtccagaaaggaagatcatacctatgattttaacgatgaacaggaagatgttgactttgttcttgccaatggtgaggaaaaggatgatgaggcgacattggctgtcgaagaggaactggcgaaagcagataatgaagatcatgtcgaagagattgccctgctgcaaaaagagagtgaaatgcctattgaagtactacttgcaaggtataaggaggatttcggtggcaaggatatatctgaggatgaatctgaatcttcatttgctgtatctgaagactctatagtagactctgacgaaaataggcagcaagctgatttagatgatgacaacgttgatttaacagaatgtaagctagatccagagccttgctcagaaaatgttgaaggcacattccatgaagtagcagaagataatgataaagatagtagtgataaaattgctgatgcagcagcagcagcaagatctgcccagccaactggatttacatactccacaacaaaagttcgaacgaaactgccgtttctacttaagcattctctgcgtgagtaccaacacattggtttggactggcttgtcacgatgtatgagaaaaagttgaacggtattctggctgatgaaatgggtcttggaaagacaattatgaccattgctcttctagctcaccttgcatgtgataagggaatatggggtccccatctgattgtggttcctacaagtgtgatgcttaattgggagactgagtttcttaaatggtgtcctgcatttaaaattctcacctactttggtagtgcaaaggagcggaaactcaagagacaaggatggatgaagcttaactcatttcatgtatgcataacaacctataggctagttattcaggacagtaaaatgttcaagcgcaagaagtggaaatacttgattcttgacgaagcccatttaattaagaattggaagtctcagagatggcagacactattgaacttcaattctaaacgcagaattttgttgactggtacacccctgcagaatgatcttatggaactgtggtcacttatgcactttctgatgccacatgtctttcagtctcaccaggaattcaaagactggttctgtaacccaatagcagggatggtcgagggacaagaaaaaatcaacaaagaagttattgatcgcttacataatgtcctccgtcctttccttctacggcgcctaaaaagggatgtggagaagcaacttccttcgaaacatgagcatgttattttctgtagactgtctaagaggcagcgcaacttgtatgaggacttcatagcaagcacagaaacacaggctacgcttaccagtggaagcttttttgggatgataagtatcataatgcagttgcggaaagtttgtaatcatcctgatctctttgagggtcgtcctattgtaagttcttttgatatggctggcattgatgtgcagttgagttcaacaatctgttcgctactattggaaagtccgttttccaaggttgatcttgaggctttgggattcttattcacccatcttgatttttctatgacttcttgggaaggagatgagatcaaagctatttcaacaccctcagaattaatcaaacagcgtgtgaacttgaaggatgatctagaagcaatccctttgagtccaaaaaaccgcaaaaatctgcaagggacaaatatttttgaagaaattcgtaaggctgtctttgaggaaaggatacaagaatctaaggatcgggcagcagccattgcatggtggaattctttgagatgccagagaaagccgacttactctacatcactaagaactcttttaaccattaagggtcctcttgatgatcttaaagctaactgttcatcttacatgtattcatcaatcctcgctgacatagtcctttcaccaatcgagcgttttcagaagatgattgagctagttgaagctttcacatttgcgattccagctgcacgagtgccttcacctacttgctggtgcagtaaaagtgactctcctgtttttcttagtccatcgtacaaggaaaaagttacagatttattgtcacctcttttatctccaattagacctgcaatcgttaggagacaagtatattttccagataggcgactgatacagtttgattgtggtaagctgcaggagcttgctatgttattgaggaaattaaaatttgggggtcacagagcgttgatattcacgcaaatgaccaagatgcttgacgtcttggaggctttcattaatttatatggttatacctacatgcgtcttgatggctctacacctccagaagagaggcagacgttaatgcagcggtttaatacaaatcccaagatctttcttttcattttgtcaacccgaagtgggggcgttggcatcaaccttgtgggtgcggacacagttatattctatgacagtgactggaatcctgctatggatcaacaagctcaagatcgctgccacaggataggtcagacacgtgaagtgcatatataccggttgataagtgagagcaccattgaggagaatatcttaaagaaagcaaaccagaagcgtgtgcttgataacctagtaattcaaaacggtgagtataacaccgaatttttcaagaagctcgatcccatggaattgttctctgggcataaggctctgactacaaaggatgaaaaggaaacaagcaagcattgtggggcggatatacctctatcaaatgcagatgttgaggctgctctaaaacaggccgaagatgaggcagattatatggctctcaaaagagtagaacaagaagaagctgtggacaatcaagagttcacagaagaacctgtagagagaccagaagacgatgagctagtaaatgaagatgacataaaggctgatgagcctgctgatcaaggtttagttgcagcagggccggccaaagaagaaatgtcattgttacatagtgatatcagggatgagagagctgttatcactacttcaagccaagaagatgacactgatgtattagatgatgtcaagcaaatggctgcagcagcggctgatgctggacaagctatctcatcttttgagaatcagctacgtcctattgatagatatgcgattagatttttagagctttgggaccccatcattgttgaggctgcaatggaaaatgaagcaggatttgaagagaaagaatgggaacttgaccacattgagaagtacaaggaggaaatggaagctgagattgatgatggggaagagcctcttgtttacgagaaatgggatgctgattttgcaactgaggcatacaggcagcaagtggaagtcttagctcagcaccagttaatggaagatttggaaaatgaagctagagagagggaagcggcagaggtggctgaaatggttttgacacagaacgaaagtgctcatgtactgaagcctaagaagaagaaaaaggcgaagaaagccaaatataaatccctgaagaaaggatcactggctgccgaatcaaaacatgtgaagtcagttgtgaaaattgaagattctactgatgatgataatgaagaattcggctatgtgagtagcagtgactcggatatggttacaccgctttcgcggatgcatatgaagggcaagaaaagagatttaattgttgacactgatgaagagaagacctcaaagaagaaagcaaagaagcacaagaagtctctcccgaattcagatatcaaatataagcaaacaagtgcactacttgatgaactggaaccatcaaagccgtctgacagtatggttgttgataatgagttgaaattgacgaacaggggtaaaactgtagggaaaaaattcatcacttccatgccaataaagcgtgttcttatgatcaagccagagaaattgaagaaaggaaatctgtggtctagagattgtgttccctcgcctgattcttggttgccgcaggaagatgctatattgtgtgccatggttcatgaatatgggcctaactggaattttgttagcggaactctttatggaatgacagctggtggggcttacagaggacggtatcggcatcctgcatattgttgtgagagatatagagagcttattcaacgacatattttgtctgcttccgacagtgcagtgaacgagaagaacctcaacacaggttctgggaaggctctccttaaagtcactgaggaaaatattcggacactcctaaatgttgcagctgagcagccagatacggagatgctcctacaaaaacatttttcttgcttgctgtcatcaatttggaggacgtctacccgcactgggaatgatcaaatgctctccttaaacagtcctattttcaacagacagtttatgggttccgtgaatcacacccaagatttagctagaaagccttggcaggggatgaaggtcaccagcttaagtagaaagttgttagaatccgctctccaggattctggcccgagtcagccagacaatactatttcccgttctaggttgcaggagactcaacctatcaataaattgggattagagttaaccttggaattcccacgtggcaatgatgattccctgaatcagtttccaccgatgattagtctgtccattgatgggtcagattcattaaattatgtgaacgagcccccaggggaagatgttctaaaaggttctagggttgctgcagagaaccgttacaggaatgctgcaaatgcttgtattgaagattcatttggatgggcttcaaacacgttcccagccaatgatctgaagtcaagaacaggcacgaaagcacagtccctggggaaacacaagctatccgcctcagactcagccaagtctacaaaaagcaaacaccgcaaactcttagcagagcaattggaaggggcatgggttaggccaaatgatccgaatctcaagtttgatttcacacctggtgatagggaggaggaggaggagcaggaggtggatgagaaagcgaattcagcagagatagagatgataagctgttcacaatggtatgatccattctttacctcaggccttgatgattgctcattagcttcggatatctcagaaatagagtag

SEQ ID NO: 205 - DNA, 4500 bp, Arabidopsis thaliana
atggtgactacaaggtcgcaggagggtgacggaaaggggaaagaggtggagttggaggttccgctggattcccgagttacgcggttagaaacgacggtcgctgagcaacataaggagatgatgaagcagtttgctgatttgtatgcagtgcttagccgatctacagctggtaagatggtggatgagcaatcgacgttagatcggagtgcgccgaggtcgtctcagtcgatggagaacagatccggttaccctgatccatatcgtgatgctcgtcatcagcaggtgcgatcagaccattttaatgcttataataatcttacacggttagggaaaattgattttcctcggtttgatggtacacggttgaaagagtggttgtttaaagtcgaggagttttttggtgtggattcaactccagaagatatgaaggttaaaatggcagcgatccactttgatagccatgcctctacttggcatcagtcctttattcagtcgggtgttggtcttgaggtgttgtatgattggaagggatatgtgaagctgttgaaggaacgatttgaggatgattgtgatgaccctatggcggagctaaaacatttgcaggaaactgatggcatcattgattatcatcagaaatttgagctgattaaaacaagagttaatctctctgaagaatatttggtgagtgtgtacttggcaggactcaggacagacactcaaatgcacgtccggatgtttcagcctcaaactgtgagacattgcttgttcttgggcaagacatatgagaaagcacaccctaagaaaccagctaatactacttggtccacaaatcgttctgcacctactggcggttataacaaatatcagaaggaaggcgagtctaagacagatcattatggaaacaagggaaattttaaaccggttagtcagcaacctaagaaaatgtctcaacaagaaatgagtgataggaggtctaaagggctatgctatttttgtgatgagaagtacactccagaacattatttggttcacaagaaaacacaactgtttcgaatggatgttgatgaagagtttgaagatgctagagaagagttggtaaatgacgatgatgaacatatgccacaaatctctgtcaatgcggtttcaggaatagctggttacaagactatgagagttaagggaacatatgacaaaaagattatcttcatcctgatagactcagggtcgacacacaactttctggatccaaatacagcagctaaacttgggtgtaaggtggacacagctgggttaactcgtgtatctgtagctgatggcaggaaattgcgtgttgagggtaaagttactgatttctcttggaagttgcagactacaacttttcagtctgatatcttattgattcccttacaagggattgatatggtactaggggtgcaatggttggagactttgggtcgtatctcttgggaattcaagaaactggaaatgcgatttaaattcaataatcagaaagtacttttacatggacttacatcaggttctgtcagggaagtgaaggcgcagaaactgcagaaactacaggaagatcaagttcagctggccatgttatgtgtacaagaagtttcggagagtacagaaggggaactttgtactattaatgctttaaccagtgagcttggtgaggagtctgtagtggaagaagtactcaatgagtatcctgatatattcattgaaccgactgctttacctccatttcgtgagaagcataatcataagattaaattgttggaggggtctaatccggtgaatcagcgaccctatcgctattcaatacaccagaagaatgaaattgataaactggttgaggatttacttactaatggaacagtgcaagctagttctagtccttatgcttcacctgttgttttggtcaaaaagaaggatggaacttggagactttgtgttgactatcgtgagttgaatggcatgactgtaaaagatagttttcctattccattgattgaggatctcatggatgagttgggaggtgcagttatcttttccaagatagatcttcgggctggttaccatcaggtgcggatggatcctgatgatatacaaaagacagcatttaaaacgcatagtggccattttgagtacttggtcatgcccttcggactcactaatgcaccggctacgtttcaaggtctcatgaatttcatattcaagcccttcttacgtaagttcgtcttggtcttctttgatgacattctggtttatagttcttccttggaagagcatagacagcaccttaagcaagtgtttgaagtcatgcgagctaataagttgtttgccaaactcagcaaatgtgcttttgcggttcctaaagtcgaatatctaggacacttcattagtgcacaaggcattgaaactgatcctgcgaaaatcaaggctgtgaaggagtggcctcaaccaacaacactcaagcagttgagggggttcttgggtcttgctggttactatcgacgttttgtgcggagttttggggttattgcgggaccattacatgctttgactaaaactgatgcatttgaatggacagcagtagcacaacaagcgtttgaggatcttaaagcggccttgtgtcaagcgcctgtcttatctttgcctctgtttgataaacaattcgtggtagaaactgatgcgtgtggtcagggcataggggcggttttgatgcaagagggacatcctttggcttacattagtcgccaattaaaagggaagcaactacacctatctatctatgagaaagaattgctggcagttatctttgcagtccgaaaatggcgacactatttgctgcagagtcacttcataatcaagactgatcaaagaagtttgaagtatctattggagcagcgtttgaacacaccaattcagcagcagtggcttcctaaattgctcgagtttgactacgagatccagtatagacaaggaaaagaaaatgtagtggcagatgctttgtctcgggtagaaggatctgaggtgttgcacatggctatgacagtggtggagtgtgatttgttgaaggatattcaagcaggctatgccaatgactctcagttacaagatattattactgcacttcaacgtgatccagattcaaaaaaatatttctcttggagtcagaatatactgagaaggaaaagtaagattgtagttccagcaaatgacaacattaagaatacaatattgctttggttacatgggtcgggtgtaggaggacattcaggcagggacgtgactcatcagcgtgttaaaggactgttttactggaaaggcatgattaaggacatccaagcttatattcgcagctgtggtacatgtcaacaatgtaagtctgatcctgcagcttcaccggggttactccagccattaccaatccctgataccatttggagtgaagtgtcaatggattttattgaggggctaccagtttcaggaggcaaaacagtcatcatggttgttgtggatcgcttgagtaaggctgctcacttcattgcattatcacatccttatagtgcattgacagtagcacatgcttacttggacaacgtttttaagttacatggctgccccacttcgattgtcagtgacagagatgttgtgtttacaagtgaattttggagagagttcttcacgttacagggagttgcattgaagttgacgagtgcttaccatccccagagtgacggacaaactgaagttgtgaacagatgtttggagacctacttgcgttgtatgtgccatgacagacctcagttgtggagtaaatggcttgcattggcagagtattggtacaacaccaattaccactcttctagcaggatgacgccatttgagatagtgtatgggcaggtacctccagtccatttaccttatctgcctggggaatcaaaagtggcggttgtggctaggtctttgcaggagagggaagatatgttgctgttcttgaagtttcatttgatgcgcgctcaacaccgaatgaaacaatttgcagaccagcatcgaactgaacgtgaatttgagattggggattatgtctatgtgaagctgcaaccttaccgccaacaatctgtggtgatgcgtgctaatcagaagctgtcaccgaagtattttggcccatataagatcattgatcgttgtggtgaagtggcttataagttggctcttccttcttactctcaagtgcatcctgtgttccatgtttcgcagctaaaggtgctagtgggcaatgtctctacaacagttcatttgccttcagtgatgcaagatgtctttgagaaagtacctgagaaagtggtggaaaggaaaatggtcaatcgtcagggaaaagctgtcactaaagtgttggtgaaatggagcaatgaacctttggaagaagctacatgggagttcctcttcgatttgcagaaaacatttcctgagtttgaagcatag

SEQ ID NO: 206 - DNA, 393 bp, Arabidopsis thaliana
atggctggtcgtggaaaaactcttggatccggtggggcgaagaaagctacatctcggagtagcaaagccggtcttcaattcccggtgggtcgtatcgctcgtttcttaaaagccggtaaatacgccgaacgtgttggtgccggtgctccggtttatctcgccgccgttctcgaatatttggccgccgaggttcttgaattagctggaaacgcagcaagagacaacaagaagacacgtattgttcctcgtcacattcagcttgcggtcagaaacgatgaggagctaagcaagcttcttggagatgtgacgattgctaatggaggagtgatgcctaacatccacaatctccttctccctaagaaggctggtgcttcaaagcctcaggaagattag

SEQ ID NO: 207 - DNA, 6531 bp, Arabidopsis thaliana
atggaacccactgattctactaacgagcaactcggagacactaagaccgccgctgtcaaggaagagagtcgctcctttctcggcatcgatctcaacgaaatccctaccggcgctactctcggcggtggttgcaccgctggtcaggatgacgacggcgaatatgaacctgttgaagttgttaggtcaattcacgataacccggacccagcccctggagcccctgccgaggttcctgaaccggatcgggatgcttcgtgcggcgcgtgtggaagacctgagtctatagagctcgttgtagtctgcgatgcctgtgagcgaggctttcatatgtcttgtgtcaacgatggagttgaggcggctccttccgccgattggatgtgcagcgactgtcgtactggcggcgagaggagcaaactgtggccgttgggggttaagtccaagctcattctggacatgaacgcctcgccgcccagtgatgctgagggatacggagctgaggagacgtctgattcgagaaagcatatgctcgccagcagctcttgcattggaaactcttttgattatgcaatgatgcattcaagcttctcaagtctcggtagaggacatgctagtctcgaagcttcagggttaatgtctcgtaatactaaaatgagtatggatgcattgggttcacataatctaggttttggattcccattaaacttgaacaatagtagtttgcccatgagatttccatccttggatccaagtgagttgtttctgcaaaatctcaggcatttcatatctgaaaggcatggagtattggaagatggctggcgtgtcgaattcagacaacctttaaatggttatcagttatgtgcagtgtattgtgctccgaatggaaaaacatttagttcaatacaagaagttgcttgttatctgggcttggcaattaatggtaactacagctgtatggatgctgaaatcaggaatgagaattctcttcttcaagaaagattgcatacgcccaagagaagaaagacatcaagatggccaaacaatggtttccctgagcaaaagggtagttcagtgagtgctcaactcaggcgttttccattcaatggtcagaccatgtctcctttcgccgttaaatctggtactcattttcaggctggtggttctcttagctctggaaataatggatgcggttgtgaggaagctaagaatggatgtccgatgcagtttgaagatttctttgttctgtcgcttggacgaattgacataagacagtcttaccataatgtcaacgtgatttatccaataggatataagtcctgctggcatgacaagatcacggggtcactatttacatgtgaagtatctgatggcaattctggtcccattttcaaggttacacggtcaccatgctcgaaatcatttattccagctggatcaactgtcttctcctgcccaaagattgatgaaatggtggaacagaacagtgacaaacttagtaatcgtagagatagtactcaagagcgtgatgatgacgctagtgttgagatccttctttcggaacactgcccacctcttggagatgatatattgtcttgtttacgtgagaagagtttctccaagacagtcaattccctgcgctcagaggttgattcttctcgagtagattttgataaaaatttatcctatgatcaggaccatggggttgaaattggtgacattgttgtggaagaagattcattgtctgatgcatggaaaaaagtgtctcaaaaacttgttgatgcatgttcaattgtactgaagcagaagggtaccctgaatttcctatgtaagcatgttgacagagaaacaagtgaaatcaactgggataccatgaatgagaaagacaatgtaattttatcgttgtcaaaattttgctgttcgttggctccttgcagtgtcacgtgtggtgaaaaggataaaagcgaatttgcagcagtagttgatgctttgtcaaggtggctcgatcaaaacagatttggacttgatgcagattttgtacaggaaatgattgaacatatgcctggtgccgaatcatgtacgaattataggactctgaagagtagaagttcttcttctgttcctataactgtagcggaaggagcgctagtggtcaaaccaaaaggtggggaaaatgtcaaggacgaagttttcggtgagatttctcggaaagccaagaagcctaaactaaatggtggtcatggtgtcagaaatctacaccctcctcctgggaggccaatgtgtttgaggctccctcctgggcttgttggtgacttccttcaggtatctgaagtgttctggcgtttccatgaaattttgggttttgaagaggctttctcacctgaaaaccttgaacaggagcttatcaatccagtgtttgatggtttgtttcttgataaacctgggaaagatgataagagaagtgagattaactttactgataaggattctacagctactaaacttttttctttgttcgatgaatctcgccaaccttttcctgcaaaaaatacctctgcttctgaactaaaggagaaaaaggcaggggattcttctgattttaagatttcagattcctctcgtgggtcgtgtgtgggtgcacttctaacaagggctcacatttcgcttctgcaagtgctaatatgtgagctgcaatccaaggtagctgcatttgttgatccaaactttgattctggcgaatcgagatccagacgaggacgaaaaaaggatgacagtacactttctgctaaaagaaataagctgcatatgcttcctgttaatgagttcacttggcctgaattggcccgtaggtacatcttgtctcttttatccatggatgggaacctcgaatcagcagagattgctgcacgtgaaagtggtaaggtattccgttgcttacaaggggatggtggtttgctttgcggctcgcttacaggagtggctgggatggaagcagattcaatgttacttgcagaggctattaagaaaatatctggttcgttgacaagcgaaaatgatgttctttctgtggaagatgatgattccgatggccttgatgctactgagacaaacacttgcagtggtgatattccagagtgggctcaggttttggaacctgtgaaaaagcttccaacaaatgttgggactagaatcagaaagtgtgtctatgaagctttagagagaaatccaccagagtgggcaaagaagatattggagcattctatcagtaaagaaatatataaaggcaatgcatcaggaccaacaaagaaagctgtcctctcattgctagcggatattcgaggtggagacttggtgcagaggtctattaaaggaaccaaaaagcggacatatataagtgtatctgatgtcattatgaagaaatgccgtgctgtattgcgtggtgttgcagctgcagacgaggataaagtcctttgcactttactgggaagaaagttactgaattccagtgataatgatgatgacgggctcctgggatcacctgcaatggtttcgcgtcccttagacttcagaactattgatttgaggttggctgctggtgcgtatgacggatcaactgaagcttttcttgaagatgttcttgagctgtggagtagtatacgtgttatgtatgcagatcagcccgattgtgtggacctggttgcaacattgtctgaaaaattcaagtcgttatacgaggctgaggttgtaccacttgttcagaaacttaaggactacaggaaattggaatgcctaagtgcagagatgaagaaggaaattaaggacatagttgtttcagtaaataagcttcccaaggccccgtgggatgagggggtatgtaaagtatgtggcgttgacaaagatgatgacagtgttctcttgtgtgatacatgcgatgctgagtatcacacatattgtttaaatccacctcttattagaattcctgatggaaattggtattgtccatcttgtgtcattgccaagcgcatggctcaagaggctttggaatcttacaaactagttaggcggcggaaaggtagaaagtatcagggggaactcacccgagcttctatggaactgactgctcacctggcagatgtgatggaagaaaaggactactgggagtttagtgctgaggagagaatcttgctgcttaagcttctatgcgatgaactgcttagttcatctcttgtccatcaacaccttgagcagtgtgccgaagcaataattgaaatgcagcagaagttacgctctctttcctcagaatggaaaaacgcaaaaatgcggcaagaattcctgacggctaaactggcaaaggttgaaccgagtattctgaaggaagtgggcgaaccacataattcaagctactttgcagaccaaatgggatgtgatccacaaccacaggagggcgttggagacggagttactcgtgatgatgagacttcctctactgcatatcttaacaagaatcaaggtaaatctccacttgaaaccgatactcaacccggagagtcgcatgttaatttcggtgagagcaaaatttcctccccggaaacaatatcatcccctgggaggcatgagctacctatagcagatacctctcctcttgtaacagataatctgcctgaaaaagatacctcggagaccttgcttaagtcagttggaaggaatcatgaaacacattcaccaaattccaatgcagtagaattgccgacagctcatgatgcatcttctcaggcttcccaagagttgcaggcttgtcagcaggatttgagtgccactagtaatgaaattcagaatcttcagcaatcaattagaagcatagaatcacagcttctaaagcaatctatacggagagattttctgggaaccgatgctagtggtcggttatattggggttgctgcttcccagatgaaaatcctcgtatattggttgatggaagcatatctttgcagaaacctgttcaagccgatttgataggttcaaaagtcccctctccgtttctccataccgttgaccatggaagactaaggctttcaccctggacgtattatgaaactgaaaccgagatcagtgagcttgtccaatggcttcatgatgatgatctgaaagaaagagacctgagagagtctattttgtggtggaaaaggttacgatatggagacgttcaaaaggaaaagaaacaagctcagaatttatctgctccggtatttgctacgggtcttgagaccaaggctgccatgtcaatggagaagagatatggtccatgcatcaaactggagatggaaaccttaaaaaaacgggggaagaagacaaaggttgcagagcgagagaaattgtgtagatgcgaatgcttggaatccattttgccatctatgattcactgcctcatatgccataaaacattcgcaagtgatgatgagtttgaggatcacactgagagtaagtgtattccttattcattagcaactgaagaaggcaaggacatctctgattcttcaaaagccaaagaaagtctgaaatccgattatcttaatgtaaagtctagtgccggcaaagatgtagctgaaatatccaatgtttctgaacttgattctgggttgataagatatcaagaagaagaatctatttccccataccattttgaggagatctgttccaagtttgtgacaaaggattgcaacagagatttggttaaagagatcggtctgatcagttcaaatggcattccaacatttcttccatcgtcatctactcatcttaacgactccgtgctcatctctgccaaatccaataagccagatggtggtgattcaggggatcaggtcatttttgctggtcctgaaaccaatgttgaaggcttaaattctgaatctaacatgtcattcgatagatctgtcacagacagtcacgggggtccactggataaaccaagtggactgggttttggcttctcagagcaaaagaataagaaatcttcaggtagtgggttgaaaagctgctgtgtggttccacaggctgctttgaaacgagtaactggcaaagctttgccgggtttcaggttcctgaaaaccaacttgcttgatatggatgtagcactgcctgaagaagctttaagaccatcgaaatcacatccaaaccgtagaagagcttggcgtgtatttgttaaatcgtcgcaaagtatatacgagttggttcaggcaacaattgtggtagaagatatgattaagacagagtacttgaaaaatgaatggtggtactggtcttctctttcagcggctgctaaaatctcgactctctcagcgttatccgtccgtatcttctccctcgacgctgctatcatttatgataaacccataactccatcaaatcctatcgatgaaacaaagccgatcatcagcttaccggaccaaaagtcacagccggtttcggattctcaagaaagaagcagcagagttagaagatctggcaagaaaaggaaagaacccgagggatcctag

SEQ ID NO: 208 - DNA, 1191 bp, Arabidopsis thaliana
atggttcttcttagtttctccttaagattcattgcgttcactctgactataactctgactcagattgctgatgggtttcagagtcgaatgttgatgaacaatggacttgctctctctcctcaaatgggatggaacagctggaatcattttcagtgtaatatcaatgaaacccttatcaaacaaaccgctgatgcaatggtttcaagtggtctttctgcaataggttacaagtatatcaacatagatgattgttggggtgaactcaagagagattctcaggggagtttggttgcaaaagcatcaacatttccttcaggaatcaaagctttatcagattatgttcatagcaaagggctaaaacttgggatatactctgatgccgggactcttacctgcagccaaaccatgccgggatcactcgggcatgaagaacaagatgccaagacatttgcctcatgggggattgattacctcaagtatgataactgcgaaaatacagggacaagtccaagagaaagataccctaagatgagtaaagcgctgttaaattcaggaagatccatattcttctctctgtgcgaatggggacaagaggatccagcaacttgggcaggagatattggcaacagttggagaacaacaggagatatccaagataattggaaaagcatgacattgatagcggatcagaatgatcgatgggcatcttatgcaagaccaggatcgtggaacgatccagacatgcttgaagtgggaaatggaggcatgactaaggaagaatacatgtcgcatttcagcatctgggcattggcaaaagctcctctgctgatcggctgcgatcttagatcgatggacaaagttacatttgaattgcttagcaacaaagaggtgattgctgttaatcaagacaaacttgggatccagggaaagaaagtaaagaaagaaggtgatcttgaggtatgggcaggtccactaagcaagaaacgagtagcggtcatcctatggaacagaggatcagcatctgcaaacatcacagctcgatgggctgagattggcctcaattcatcagatattgttaatgctcgtgacttatgggagcattcgacatattcatgtgttaaaaagcagctatctgccctagtggagcctcatgcctgcaaaatgtatactcttacaagacgcaaggcataa

SEQ ID NO: 209 - DNA, 3273 bp, Arabidopsis thaliana
atggcggaaaatacggccagccatagaagaaaacctcggagcttgaacgatcgtcactacagtatcctccaggatctttctgcgcctcctagacagcctccctcttcttctcatggagaagatgaagagacgaagaagtccatgattaagcttgctggacgacgtcgtctttgcaaggccttgccaaaggaagacgaagctgatggatatgacgatcctgatttggttgatttctattccccagttaaaggagagacatcactagacagcgctggaattgggaacaaattcacatcttgggatgaatcaaaggaagctaacactgagctggctggcgagcctaacttttcgataatcacagacttttgttcgccctcacctcagttgaagcaaaaagaggaaatgcaaggtgatggaggaaggaacgagatcatgggtattttggatgatttgacctctaagcttgggacaatgtcgattcagaagaagaaggatagccaaagcaatgattttgatgcatgtggagtgaagagccaggttgataaatttgattttgaggatgccaaatcctcattttccttgctatcggatctatctaagtcctcaccagatgtggttaccacatataatgctggcgttaatagtatcaaggacaagcaaggcaaatctggttttgccatccgggaagagcaaactagtaaggaattttcaagggaatgggaagaaagaatttcgaatgttggaaagcaaaactcatattctggtcggcactttgacgataactctgaagataataggcagggatacaatcttgaccgtgggaagagccaatgcaaggaagtcgaccaaagtatgaagacgaccaggcacatagaggtaagtgagaagataagaacagtcggaaggtctaatgctgccaagctaagagacttagacgaggatgatgatgatgatgactgtctcattttgtccgggaaaaaggcggctgaaatgaaaattaataagccagctcggtcttataacgccaaaagacatggttatgatgagagatcgttggaagatgaagggtctatcactttaactggcctcaatttgtcttacacattgcctggaaagattgcaacaatgttatatccacatcagagggaagggttgaattggctttggtcattgcatacccaagggaaaggtggaatacttggagatgatatgggtttaggtaaaactatgcagatttgtagttttcttgctggtttattccactccaaattgatcaagcgtgctctggtagtggccccaaaaaccttgctgcctcactggatgaaagaattagctaccgtgggactttcacaaatgactagggaatactacggtacttctacgaaagcccgggaatatgatctccaccacattctgcagggtaaaggtattcttctaacaacctatgatattgtgcggaacaatacaaaggctttgcaaggtgacgaccattatactgatgaggatgatgaagatggaaacaaatgggactacatgattctggacgagggacatcttattaagaaccccaacacacaaagggcgaagagtttgcttgagatcccaagttctcaccgtattataataagtggtacaccaatccagaacaatctcaaggaactgtgggctctcttcaacttcagctgccctgggttactcggtgacaagaattggtttaagcagaattatgagcattacattcttcgtggaactgacaaaaatgctactgatagagaacagaggataggctcaacagtagcaaagaacttgagggagcatattcaacctttcttcttgcggcgccttaagagtgaagtcttcggtgatgatggtgcaacctccaaactttcgaagaaggacgaaattgttgtatggttacggttaacagcttgccagaggcaattatatgaagctttcttaaacagtgaaattgttctgtcagcttttgatggttcacctctagcagctctaacgattctgaagaaaatatgtgaccacccgcttctcttaactaagagggctgctgaggatgtccttgaaggaatggattcaacattaacacaagaagaagcaggcgtggctgagagattggctatgcatatagcggacaatgtggatacagatgattttcagaccaagaatgacagtatctcttgcaaattgtcatttatcatgtcgctactggaaaatttaattccagaggggcaccgtgttctaatcttctcccagacacgcaagatgcttaatctcattcaggattctcttacctccaacggttatagtttcttgcgaattgatggtacaacaaaagcccctgacagattgaagactgttgaagaatttcaagaaggtcatgtggctcctatatttctcttgacttctcaagttggtggtctcggccttactctgactaaggcagaccgtgtgattgtggtggaccctgcctggaatccaagcacggacaaccagagtgttgatcgagcatatagaattgggcagacaaaggatgtcatcgtatataggttaatgacctcagcaactgttgaagaaaagatatacagaaagcaggtatacaagggaggattgtttaaaactgcaactgagcataaagaacaaatccgctacttcagccagcaggaccttcgagaactttttagtcttcccaagggaggctttgatgtttcacctacacaacagcaactatacgaagagcactataaccaaatcaaactagatgaaaaactggaatcccatgtaaagtttctcgaaacccttggtatagctggagttagccaccatagcttacttttctccaagacagctcctattcaagcgatacagaaagatgaagaagaacaaataaggagagaaacagcattgctcttgggacgcgcatcagcaagtatttcacaagacaccgtcatcaatggggctgactatgctttcaagccaaaggatgtgaatttggacaagagaatcaacatttccccagtcgatgacaaggaattgtcagaaagcgtaattaaagcaagactcaatcgtttgacgatgctattacaaaacaagggtacggtctcaaggctacctgatggaggggcaaaaatccagaagcagattgctgaattgactcgagaactgaaagacatgaaagcagcagaaaggatcaacatgcctcaagttattgacttggaggaggatataagtcggaagatgcaaaaaggattgaatctgtag

SEQ ID NO: 210 - DNA, 4824 bp, Arabidopsis thaliana
atggactggatacacaaatctactccttttatggaaccttcgaatttggcaaaactggttcaaggaaatgttcctcttcagccacatgacagccattcttcgctaactgatctagatatggaccttagagaagtctatttcctgattttacattttctttctattggcccctgcgaacgaacctttggccacttgagagacgaaattttggaaaaagggcttttaccccgtagatatcattcctggtggtcaagaagtggcatttatagcgggcgtgctgatgatgatggcatctccctccccttgagttatgataatttgatagagaggtatcctcatatcgaaaaggatcacttggtgaagcttctcaaacaactaattttaaacccgtctttcccttcacacatgagagttgaaggaaatgctcctaatgctgctgatgttccaacactattgggatctggcaccttttcacttgtggatcgtagtaattcttattcatctactttgtccaacatgttcctttggatctgggacttgaaaaaatcccatatatgcatagaacctgatagtggctctaaggctttgcattttagaaatttgtttttctggctttggcaatctttacttggtatcatgacttgtattgggaattctggtgaagtagctcatataggagaagttaagtccaggggtaacaatatagagtctcagaaagctaggcatgttgcgtcatacttacgctggccgcatatgcatgccgatcaagtgcgtggcctaagtctcagagaaattggaggaggtttcaggaaacaccaccgtgctccgtccattctttcagcatgtcatgctattgcaaaaccatcaacaatggttcaaaagatgcaaaatataaagaagctcagaggacatcgtaatgctgtctactgcgctatatttgatcgttctggaagatatgttatcactggctccgatgaccggcttgtcaaaatttggtcaatggaaactgcgctttgcttggctagctgccgtgggcatgaaggtgacattacagacttggccgttagttcaaacaatgctttggttgcttcagcttcaaacgattttgtgattcgagtgtggcggttgcctgatggaatgccaatttctgtattgcggggacacactggagctgttaccgcaattgcattcagtcccagacaggcgtctgtttaccaacttttatcgtcatcagatgatggaacctgtcgtatctgggatgctaggtattctcagtggctcccacgaatctatgttccaagtccttcagatgctaacactggctcattggaagtttctctcttaggcgaaagcacttttacatcttccaacacaggatccacgagcaatgcatctcagagtcatcaaatattatgttgtgcatacaatgctaatggaaccattttcgtcacgggtagctctgacagcaatgcaagggtttggagtgcctcaaaacctaacttggatgatgctgaacagccgactcatgagctggatgttctacggggccatgagaatgatgtcaactatgtgcaatttagtggttgtgctgtggctccaaaatcttcaacagctgatgctctgaaggaagatagctacccaaagtttaagaattcctggttttgtcatgacaatatagtaacctgctctcgcgatggtagtgcaattatatggactccaagatcacgtaaattccatgggaaatctggacgctggatgaaaggatatcatctgaaggttccacctcctccacttcctccacaacctcctcgaggaggcccacgtcaaaggtttcttccaacaccacggggtgttaatatgattatatggagcttggataatcgttttgtacttgccgctatcatggattgcaggatttgtgtttggaatgctgctgatggtagcttagtgcattgtttaactggtcacagtgaatcgtcttatgtcttggatgtccatcctttcaatcctcggattgctatgagcgctggctatgatgggaaaacaatcatctgggatatatgggagggtataccaatcaaagtgtacgaaatcgggagatttaagttggttgatggaaagttttcacaagatgggacatctattgtgctttcagatgatgttggccagatatattttctaaacacaggacaaggagagtctcaaaagaatgcaaaatacgaccagttcttccttggtgattatcgtcctcttattcgagataccaatggacatgttcttgatcaggagacgcagctacttcctcatcggaggaaccttcaggatcttctttgtgattcaagtatgattccgtatccagaacctgaccagacaatgtttcagcaacgcagacttggtgcattaggagttgaatggcgtccttcctcgataaagttttctgttggccctgattttagtttaggtcaagattatataatgcctcctttggctgatctggatagactgattgagccattgcctgagtttatagatgctatgtactgggaaccagaacacgaagttctgagtgacgacaatgattcagagtataatgctgaagtttcctctgatggggctagggcaagcccatgttccaactcttcaaatgaacttgagtgcagctccgaggacagtgacgttgaaaatattcacgaaagtagctatcattggaaaagaagaagaaaacatcctaaggtcaacgtctctacttcatctggaagacgtgataagaggattttggatgagaatgatagctcgaattctggaattaagagaaccaagaaccgaagaattgtcgtgaaggcttcaaaaagaaaacattctgatgtcaaagcatcacggccgcagagagcagcagctcaaaatgctcgatccttgctttctaaaatttctggaagctcttcggatgaagttgatgatgataatgattcatccaacagtgaatctgatagaagcatacccactttgcgacagttggacaaaccatctcagatgctggaatctctttcaaatgacaaacagaagaaaagattgattgtaaagatctctgttaagaagccagcagagtctatgggaagcaagggagatgtgataaatcaggctgatttagagcaactatcttccaaacctttggaggagaatcacagagtgattggtatatattccagagaacccgggtcaagttctgtagatgcaaaaggtgattcagggtgtcagagtattccctactctatgaatacgccacagagagaaaaggccgataatcagttgataagatcttcagatcaagaccagaatatgtgcaagtggagggaagagattcctgtttgtgaacctaccgaattaactgcgcctgagaacatagaagaagcccaaccattttatggggatgaagctgatgagattcttccaaagaaagttcgacgactgaggttaaagcttcggcatcccaacagtcctcgaaaactagaacctgatgaggtggcagatgatttggcagatggtggagatgggtttgcatccatagctccctctttcatgaatccgattatggattctgaacctgtgatagatagcgttagagattcttctgcacataactttgagtttggagaagctacagctgatgtgatacgtaggaaaagatccataagaagtgaatctagtacaagaaatagcgcattacgcataaggttgggctctggatctgtagacaaaataaagaaacaagggattccttccacaagcgtgtatgatgatgcatcacttgaagaatggccttctacctcaaaagctgggtccaggtctagatctgcaagcgtcagcaaaccaagtcttcatactgggataaggttgaatagtgtctcaggaaaaatctcatggttattgttgtctgaacacgaggaaggctgccgttatatacctcagctaggggatgaagttatttacttcaagcagggtcatcaagagttccttaaaactaaagaattaaatgacagggaccgatcaaggtaccttccccgaaacctaggagcagtagagatttgcaaagtcgagaaacttaactatgatacatatcctggttctggagatagctgctgcaaaatgaccctcagggttctggattcttcttcatcacatgcctcccgcaaagagtttcaactgacacttcctgagctcattaatttccctgattttattgtggagaagactcgatacgacgctgcaattcaaacaaactggaaaattggtaatgagtgccgtgtgtggtggagagacgcaaccggtgaaggcggggcttggtgggaaggtaggattgagtcttcacaagtaaaatccactgacttcccagagagtccatgggaaagatacagagttgtctatgaaacaggggaaacgagtcttcacagcccgtgggagtttgacaatcccgagtttccctgggaaaaatctaccatcgaagatgagagaagagagaaactgctttcattatttgctggactagtaaaatcaatcagcaagcatcaggatagttacgggatccaaaagctaaacgaagcagctcaaaagatggatttctgcaataggttcccggttccattataccctgagctgattcacgaaagactagagaatcagtactacagaagtattgaatcgtttaaacacgacgtggatgcaatgctctcaaatgcggagttgtatttcgttagaagtgcacatatgctttcgaagataaagcgactgcgagataaattgacaaaaacgttaagaaagctgatctga

SEQ ID NO: 211 - DNA, 2745 bp, Arabidopsis thaliana
atggtgggactggaagatgatactgagagagagaggtcaccagtcgtagagaatggtttttccaatgggtctcggtcttcttcttctagcgcaggtgttttgtctccatcacgaaaggtcactcaggggaacgatacactttcttatgccaatattcttcgggcaagaaacaagtttgctgatgcgcttgctctctatgaggctatgctggagaaagatagcaagaatgttgaagctcacattggaaaagggatatgcttgcagacgcagaacaaagggaatctagctttcgattgtttttctgaagcgatcaggttggatccgcataatgcttgtgcccttacacactgtggtatacttcataaagaagaaggacgcctcgtagaagctgctgagtcctaccagaaagcattgatggcagatgcatcatacaagccagcagcagagtgtttagccattgttttgaccgaccttggaactagcctgaagctggctgggaatactcaggaaggaattcaaaagtattacgaagcccttaagattgacccacactatgctcctgcatattacaacttaggtgttgtatactccgaaatgatgcaatatgacaatgccttgagctgctacgagaaggctgcacttgagaggcctatgtatgctgaagcatattgtaacatgggtgtcatttataagaaccgtggtgacttggagatggcaatcacttgttatgagagatgtctagctgtgtctccaaactttgagattgcgaagaacaatatggccatagctctgacagatttaggaacaaaggttaaacttgaaggcgatgtaacccaaggagtggcatattacaagaaggctctctattataactggcactatgcagatgctatgtacaatcttggggtggcttatggagaaatgctaaagttcgacatggcgattgtcttctatgagcttgctttccactttaatccacattgtgctgaggcttgcaacaatttgggagtactttacaaagaccgtgacaaccttgataaagctgtggagtgttatcagatggctctatcaatcaaaccaaattttgcacagtcgcttaataaccttggtgtcgtctatacagtccaggggaaaatggatgctgctgccagcatgattgagaaggctatacttgctaatcccacatatgcagaagcttttaacaacctaggtgttctttacagagatgctggaaatataactatggctatcgatgcttatgaggaatgccttaagatagatccagattctcgcaatgctggccagaaccgattgcttgccatgaattacataaatgaaggactcgatgacaaactatttgaggctcacagagactggggttggcgcttcacaagattacaccctcaatacacttcatgggataatctgaaagatccagagcgacctatcaccattggatatatctcaccagatttcttcactcattcagtatcttatttcattgaagctccccttacgcatcatgattatacaaagtacaaagtggtggtttattcagcggtagttaaggcagatgcaaaaacatacaggtttagggataaagtgttgaagaaaggtggagtttggaaggatatatacgggatagatgagaaaaagatagcaagtatggtcagagaggacaaaatcgacattttggtagaactcactggtcatacggcaaacaacaagttgggaacaatggcctgcagaccagcaccggttcaggttacttggatcggctatccaaatactacgggtttgcccactgttgattacagaattacagattcgttggctgatccaccagataccaaacaaaagcaggtcgaggagctggttaggcttccggactgttttctttgttatacaccttccccagaggctggtcctgtttgtccaacacctgcgctttctaatggctttgtcacatttggtagtttcaacaacctcgcaaagataactcctaaggtgctgcaagtgtgggctaggatactgtgtgcagttcccaattctcgtctagtggtaaaatgcaaacctttctgctgcgatagcattaggcagaggtttctcaccacgctggagcagcttgggttagaatcaaagcgtgttgatctcttgcctttgattcttttcaatcacgaccatatgcaagcctattccttgatggatattagtttggacacattcccttatgctggaactaccactacctgtgagtctctctacatgggagttccatgtgttacaatggctggctcagtacatgctcataatgttggtgtcagtcttctcactaaagttggattaggacacctggttgccaaaaatgaggatgagtatgttcagctatctgttgatctagcctctgatgtcacagctctttctaaattgagaatgagtctccgggatctaatggctggatctcctgtttgtaatggtccttcctttgctgttggtcttgaatccgcatatcggaatatgtggaaaaagtactgcaaaggtgaagtgccgtccttaaggcgaatggaaatgctgcaaaaagaggtccatgatgatcccttaatctcaaaagacttgggaccatcaagagtcagcgttactggagaagccactccgtctctcaaggccaatggttctgctcctgtaccttcctctttaccaacccaatccccgcagctctcaaagagaatggactccactagctag

SEQ ID NO: 212 - DNA, 3522 bp, Arabidopsis thaliana
atggctagttcatcttcatctgagagatggatcgatggtcttcagttctcttccttgttatggcctccgccacgagatcctcaacaacataaggatcaagtcgttgcttatgttgaatattttggtcaatttacatcagagcaattcccagatgacattgctgagttggtccggcatcagtatccatcaactgagaagcgacttttagacgatgtgctggcgatgtttgtccttcatcatccggagcatggtcatgcagtcattcttccaatcatttcatgtcttattgatggctcgttggtgtacagcaaggaagctcatccgtttgcctctttcatatctttagtttgcccaagtagtgagaatgactattcggagcaatgggctttggcatgtggagaaatccttcgcattttgactcattacaaccgtcccatttataaaactgagcagcaaaatggagatacagagagaaattgtctgagcaaagctacaactagtggttctccgacttcagagcctaaggctggatcaccaacacagcatgaaaggaaacctttaaggcctttgtctccatggatcagtgatatactacttgctgctcctcttggtataagaagtgactatttccgatggtgtagtggtgtaatgggtaaatatgctgctggagagctcaagccgccaaccattgcttctcgaggatctggtaaacatcctcaactgatgccttcaaccccaagatgggctgttgctaatggagctggtgtcatactgagtgtttgtgatgatgaagttgctcgatatgagactgctacgctgacagcggtcgctgtccctgcacttcttcttcctccgccaacgacatccttagatgagcatctagttgctggccttccagctcttgaaccatatgcacgtttgtttcatagatactatgccattgcaactccaagtgctacgcagagacttcttcttggactcttagaagcaccaccgtcgtgggctccagatgcacttgatgctgctgtacagcttgtggaactccttcgagctgctgaagattatgcatctggtgtaaggctacccaggaactggatgcatttgcacttcttgcgggctataggaattgctatgtctatgagggcaggtgttgctgctgatgctgcagccgctttgcttttccgcatactctcacagccggcactgctttttcctccgctaagtcaagttgagggagtagaaattcagcacgcgcctattggtggctacagttcaaattacagaaaacagatagaagttcctgcagcagaagcaaccattgaagccactgcccaaggaattgcctcaatgctttgtgctcatggtcctgaagttgagtggagaatttgcactatatgggaagctgcttatggtttgatccctttaaattcttcggcggttgatcttcccgaaatcatagttgctaccccactgcaacctcctatcttgtcatggaatttatacattccactcctcaaagtacttgaatatcttccacgggggagtccttcggaagcatgcttgatgaaaatatttgttgccactgtggaaacaatactcagtagaacttttccgcctgaatcttccagggaactaaccagaaaagctagatcgagttttaccacaagatcagcgaccaaaaatcttgctatgtctgagcttcgtgctatggtccatgctctctttttagaatcatgcgctggtgtggaattagcttcacgcctactttttgttgtgttgactgtatgtgttagccatgaagcacagtctagtggtagcaagagaccgagaagtgaatatgctagtactactgaaaatattgaggcgaatcaacctgtatctaacaatcaaactgctaaccgtaaaagtaggaatgtcaagggacagggacctgtggcagcatttgattcatacgttcttgctgctgtttgtgctcttgcctgtgaggttcagctgtatcctatgatctctggtggggggaacttttccaattctgccgtggctggaactattacaaagcctgtaaagataaatgggtcatctaaagagtatggagctgggattgactcggcaattagtcatacgcgccgaattttggcaatcctagaggcactcttttcattaaaaccatcttctgtggggactccatggagttacagttctagtgagatagttgctgcggccatggttgcagctcatatttccgaactgttcagacgttcaaaggccttgacgcatgcattgtctgggttgatgagatgtaagtgggataaggaaattcataaaagagcatcatcattatataacctcatagatgttcacagcaaagttgttgcctccattgttgacaaagctgaacccttggaagcctaccttaagaatacaccggttcagaaggattctgtgacctgtttaaactggaaacaagagaacacatgtgcaagcaccacatgctttgatacagcggtgacatccgcctcaaggactgaaatgaatccaagaggaaaccataagtatgctagacattcagatgaaggctcagggagaccctcagagaagggtatcaaagatttcctcttggatgcttctgatcttgcgaatttcctcacagctgatagactcgcagggttctattgtggtacacaaaagcttttgaggtcagtgcttgcagagaaaccggagctgtctttctccgttgtttcactgttatggcacaaactgattgctgctcctgaaatccagcccaccgcagaaagcacctctgcgcaacaaggatggagacaggttgttgatgcgctatgcaatgtcgtatctgcaacgccagcgaaagcagcagcagcagttgtccttcaggctgaaagggagttgcagccttggatcgccaaagatgatgaagaaggccaaaaaatgtggaaaatcaaccaacggatagtcaaagtgttggtggaactcatgcgcaatcatgacaggcctgagtcactggtgattctcgcaagtgcatcagatcttcttctgcgggcaactgatggaatgcttgttgatggagaagcttgtacattacctcaacttgagctacttgaagccacggcaagagcaatacagccggtgctagcttgggggccatctggactagcagtggtcgacggtttatccaatctattgaagtgtcgtctaccagcaacaatacggtgcctttcacacccaagtgcacacgtacgtgccttaagcacgtcagtactacgtgatatcatgaaccaaagctccatacccatcaaagtaactccaaaactgccaacaacagagaagaacggaatgaatagtccgtcctatcgattcttcaacgccgcctcaatagactggaaagccgatatccaaaactgtttaaactgggaagctcacagcttgctctccacaactatgcctactcagtttctcgacactgcggctcgggaactcggctgtactatatccttgtcccaataa

SEQ ID NO: 213 - DNA, 3090 bp, Arabidopsis thaliana
atgggaacgaaagtctcagacgatcttgtttccaccgtcagatcagtcgtgggttccgattactcagatatggatataatcagggctttacacatggcgaatcatgatccaacggctgctatcaatataatcttcgacactccaagtttcgccaaacctgatgtagccactcctaccccgagcggctctaatggagggaagcgagttgatagtggattaaagggctgtacttttggtgacagcggaagtgttggagcgaatcatcgcgtggaggaagaaaatgagagtgttaatggtggaggagaagagagtgtttcagggaatgagtggtggtttgttggttgttctgaattggctgggttatcgacatgtaaaggaaggaaattgaagtctggtgatgaattggtgttcacgtttccgcatagtaaaggattaaagcctgagactacgcctgggaagcgcggttttgggcggggaaggccagctttgcgtggtgcttctgatatcgttaggttctctacaaaggattcaggagagattggtagaataccaaacgagtgggctcggtgtcttctaccacttgtgagagacaagaaaattaggatagaaggcagttgcaagtcggcgcctgaagctttgagcatcatggatacaattcttctgtctgtaagcgtgtacattaatagttccatgtttcaaaagcatagtgcgacttcatttaagacagctagtaatacggcagaggaatcaatgttccatcctctcccaaatctctttcggttactcggtttgatcccctttaagaaggcagagtttactccagaggatttttactctaagaagcgacctttgagttccaaggatggttctgctattcctacttcgttgcttcaattaaacaaggtcaagaatatgaatcaagatgcaaacggagatgaaaatgagcagtgtatcagcgatggtgatcttgataacattgttggtgttggggacagttctggattaaaggaaatggaaactccacatacacttctgtgtgagcttcgtccataccaaaagcaggcacttcattggatgacccaactggagaaaggaaattgcactgatgaggcagcaacaatgcttcacccgtgttgggaagcatactgtttagcagacaagagggaactggttgtctacctgaattcttttactggtgatgctacaatacacttccctagcacacttcaaatggcaagaggaggaatattagcagacgcaatgggtcttggaaagactgtaatgaccatatcccttttgcttgcccattcttggaaagctgcatcaactgggtttctatgccccaactatgaaggagacaaagtgatcagcagttctgtagatgatctcactagtcccccggtgaaggcaaccaaatttctaggctttgataagaggcttcttgaacaaaaaagtgtacttcaaaatggtggtaacctgattgtatgtccgatgacacttttaggacagtggaagacagagattgaaatgcatgcaaagcctgggtctctatctgtctatgttcactatgggcaaagcaggccgaaggatgcaaaacttctttcccagagtgatgtggtaatcaccacatatggagttctaacatccgaattctcgcaagagaactcagcagaccatgaaggaatttatgcagttcgatggtttaggattgttcttgacgaggcacataccatcaaaaactcaaaaagccaaatttccttggctgctgcagctctggttgctgataggcgttggtgtcttacgggtactcctattcagaacaatctggaggatttatacagccttctacggtttttgaggattgaaccatggggaacttgggcatggtggaataaacttgtccaaaagccatttgaagagggtgatgagagagggttaaagctagtgcagtctatcttaaaacctatcatgcttaggagaacaaagtctagcacagaccgagaaggaaggccgattcttgttctaccccctgctgatgcacgggtcatttactgtgaactttcggagtctgagagggatttctacgacgcgctatttaaaagatccaaggtcaaatttgatcaatttgttgaacaaggcaaagttcttcataactatgcttcgatcctggaactgcttttgcgtcttcgacaatgttgtgatcacccatttttagtaatgagtcgaggggatacagcggaatactctgatctgaataagctttctaaacgtttccttagtggaaagtcttctggcttagaaagggaaggaaaagatgtaccgtcagaggcttttgttcaggaggtggtagaggaactgcgcaaaggagagcaaggagagtgtccaatatgccttgaagcacttgaggatgctgtattaacgccatgtgctcatagattatgtcgtgagtgtctcttggcaagttggagaaattctacttctgggttatgtcctgtgtgtaggaacactgtaagcaaacaagaactcatcacagcaccaaccgaaagtagattccaggttgacgtggaaaagaattgggtggaatcatcgaaaatcactgctcttctggaagagcttgaaggtcttcgttcttcaggctctaagagcattctctttagccagtggaccgctttcctcgatctcctccaaattcccctctctcggaataacttttcatttgtccgtcttgatggcacgctaagtcagcagcaacgagagaaggtccttaaagaattttccgaagatggcagtatcctggtactgttgatgtctctaaaagctggtggcgttgggataaatctaacagctgcgtccaatgcttttgtcatggatccatggtggaacccagcggtagaggaacaagctgttatgcgtattcatcgtatagggcaaactaaggaagtcaaaatcagaagattcatcgttaagggaacggttgaagagagaatggaggcggttcaggcgaggaagcagagaatgatctctggggctttaaccgatcaagaagtacgaagtgcacgtatagaggaactcaagatgttatttacctga

SEQ ID NO: 214 - DNA, 1953 bp, Arabidopsis thaliana
atgggttcttctcacattcctcttgatccgtctctaaatccgtcaccttcactgatcccaaagcttgaaccagtcactgaatcaacccaaaacttggcctttcaacttccaaacacaaacccacaagccctaatttcatcagccgtctccgatttcaacgaagccacagacttttcctcagattacaacaccgtcgccgagtcagcccggtctgctttcgctcaacggcttcaacgtcacgatgatgttgcggttcttgattccttaaccggagcaatcgtaccggttgaggagaatccggaaccggaaccgaatccttactcaaccagtgactcttcaccgtcggttgctactcaacgacctagaccgcagccacgttcgtcggagctagtgaggatcactgatgttggacctgaaagtgagagacagtttcgtgaacatgtgaggaagacgagaatgatttatgattctcttaggatgtttttgatgatggaagaagctaaacgtaatggggttggtggaagaagagctagagctgatggtaaagctggtaaagctggttcaatgatgagagattgtatgttgtggatgaatcgtgataaacgaatcgtcggttcgattcccggtgttcaagttggggatatcttcttctttaggtttgagttatgtgtcatgggcttacatggacaccctcaatctgggatcgattttcttacagggagtcttagttctaatggggagccaatagctactagtgtgattgtttctggtgggtatgaggatgatgatgatcaaggagatgtgattatgtatacaggtcagggtggacaagataggcttggaaggcaagctgaacatcagaggctggaaggtggaaaccttgcgatggaacggagtatgtattatgggattgaagtgagagttattagagggttgaagtatgagaatgaggtttctagtagagtttatgtttatgatgggttgtttaggattgttgattcttggtttgatgttgggaagtctggtttcggtgtgtttaaatatcggttggagaggattgaaggacaggctgagatgggtagttcggtgttgaagtttgctaggactcttaagactaatccattgtctgtgagaccgagaggttacatcaatttcgatatctcgaatgggaaggagaatgttcctgtctatttgtttaacgacattgacagcgatcaagaacctttgtattatgagtatcttgcgcaaacttcgtttcctcctggcttatttgttcagcaaagtggtaatgcaagtggatgtgactgtgtcaatggttgtggcagtggctgcctttgtgaagccaagaattcaggtgagattgcttatgattataatgggacgctaataagacagaaaccgttgatacatgaatgtggatcagcgtgtcagtgccctccaagctgtcgaaaccgtgtgactcaaaagggtttgaggaataggctagaagtgtttaggtcactggaaacgggttggggagttcggtctttggatgtattacatgctggtgcttttatttgtgagtatgctggggttgctttgacaagggaacaagccaacattctgaccatgaacggtgatacattggtatatcctgctcgtttctcttctgcgagatgggaagattggggagatctgtctcaggtccttgctgatttcgagcggccttcttatcctgatattcctccggttgatttcgcaatggatgtgtccaagatgaggaatgttgcttgttacataagccacagtactgatccgaatgtcattgtccagtttgtactccatgatcacaacagtctcatgttccctagagtcatgcttttcgctgctgaaaacatccctcccatgactgagctcagccttgattacggagtagttgatgattggaacgccaagcttgccatttgtaattaa

SEQ ID NO: 215 - DNA, 1659 bp, Arabidopsis thaliana
atggttgtagaaactatcgagaggtcttgtgagggttcaaagagaagacatgtgaacggtggagatatcgctgttccttgttcgggagaagagtgtagcaatggagatataaatgtagctcctggagtttcagcgaaaagagctagggtttctagagaaatgacgtttgaagatatttacggtgctgatgcattactcaatgatgacgatgatgaggatgatgattgtgattgggaacctgtgcaggcgcctatggagtttgtaaaatggtgttgtgtcaattgcactatgtcgaaccctggtgatatggtccactgttgtatatgcggtgagcacaaggaatctggcattttgaggcatggatatttagcgtctcccttttttaaagacactggtctcattgaagtcgaggagaaatatggaggaagctcatctgcaaccagctcgacagctgttgggttcgacgagagaatgttgctacactcagaatttgaagtgaaggcacaaccacatccagagagacctgatcgtcttcgagctatagctgctagtcttgccacagctggtgtttttcctggaagatgcttgcctatcaatgcaagggaaatcacgaaacaagaactccagatggtccacacttcagagcatgttgatgctgttgatactacaagccagcttctctatagctacttcacctctgacacatatgctaatgagtattcagcacgtgctgctagacttgcagcaggtttgtgcgctgatctagctacagatattttcactggccgtgtaaaaaatggttttgctttggttagacctcccggtcatcatgctggcgtcaggcatgctatggggttttgccttcacaataatgcagccgttgctgcattagtagcacaagcagcaggggcaaagaaggtgctgattgtggactgggatgtccatcatggcaacggaacccaagagatattcgaacaaaacaaatctgtattgtacatatccttgcacagacatgagggaggaaacttctatcccggtactggagctgctgatgaggttggttctaatggtggggaaggttattgtgtaaatgttccatggagttgcggtggagttggggataaagactatatctttgcgtttcaacatgtggttctccccatagcttctgcattttctccagattttgtcatcatatctgcgggatttgatgcggctagaggagacccactaggatgctgtgatgtgactccggctggctattctcgaatgacacagatgttgggtgatctgtgtggtgggaaaatgctagttattctcgagggcggctacaatcttcgctccatatctgcttctgcaacagcagtgatcaaggtgcttctgggtgaaaatccggagaacgagttgcccatcgccaccacgccttcagtagccggcctgcaaactgttcttgatgtactgaatatccaactggagttctggccatcacttgctatcagctactccaaattactctcagagttggaagcacgtctgatcgaaaacaaaaaaaatcagatgaaaaggaaggttgttcgggttccgacatggtggaaatggggacgaaagaagcttttgtacaactttctctcggctcgtatgatttcaagatcaaagtga

SEQ ID NO: 216 - DNA, 756 bp, Arabidopsis thaliana
atgggaagaggaagagtagagctgaagaggatagagaacaaaatcaacagacaagtaacgtttgcaaagcgtaggaacggtttgttgaagaaagcttatgaattgtctgttctctgtgatgctgaagttgctctcatcatcttctccaaccgtggaaagctctatgagttttgcagctcctcaaacatgctcaagacacttgatcggtaccagaaatgcagctatggatccattgaagtcaacaacaaacctgccaaagaacttgagaacagctacagagaatatctgaagcttaagggtagatatgagaaccttcaacgtcaacagagaaatcttcttggggaggatttaggacctttgaattcaaaggagttagagcagcttgagcgtcaactggacggctctctcaagcaagttcggtccatcaagacacagtacatgcttgaccagctctcggatcttcaaaataaagagcaaatgttgcttgaaaccaatagagctttggcaatgaagctggatgatatgattggtgtgagaagtcatcatatgggaggaggaggaggatgggaaggtggtgaacagaatgttacctacgcgcatcatcaagctcagtctcagggactataccagcctcttgaatgcaatccaactctgcaaatggggtatgataatccggtatgctcagagcaaataactgcgacaacccaagctcaggcgcagcagggaaacggttacatcccggggtggatgctctga

SEQ ID NO: 217 - DNA, 942 bp, Arabidopsis thaliana
atggtgctttcgcaaaagcttcatgaagcatttaaaggaacagttgagaggatcacaggtcctcgtacgatctcggcgttcaaggagaagggagttctcagcgtcagcgagttcgtacttgccggagataatctcgtctccaagtgtcccacctggtcttgggaatctggtgacgcaagcaaaaggaagccatacttgccctcggacaaacagtttttgattactagaaatgtaccttgtctacggagagctgcttctgtggcagaggattatgaagctgctggaggtgaagtgttggttgatgatgaagataatgatggttggctggctacacatgggaaaccgaaagataaaggcaaggaagaggataacttaccatccatggatgccttggatataaacgagaaaaatactatccaatcaatacctacgtattttggaggtgaggaggatgatgatattccagacatggaggagttcgatgaggctgacaatgtggtagaaaatgatccggcaactcttcagtcaacttatcttgtggctcatgaacctgatgacgataacattctccgaactcggacatatgatctcagcataacgtatgataagtattaccaaactcctcgtgtttggctgaccggttatgatgagtcaaggatgctgctgcaacctgaacttgtaatggaggatgttagccaagaccatgctcgtaaaacggtcacaatcgaagatcatccacacttgcctggtaaacatgcttcagttcatccatgtcggcatggagctgttatgaagaaaatcattgatgtattaatgtcgcgtggagtagaacctgaagtcgacaagtacctcttcctgttcttgaagttcatggcatcagttattccaacaattgagtacgattacacaatggactttgatctcggtagctcaagcacctaa

SEQ ID NO: 218 - protein, 103 aa, Arabidopsis thaliana; identical to SEQ ID NO: 152

SEQ ID NO: 219 - protein, 995 aa, Arabidopsis thaliana
MSAQMEEPETLGKRKESESSKLRSDETPTPEPRTKRRSLKRACVHEVAVPNDYTPTKEETIHGTLDNPVFNGDMAKTYPFKLDPFQSVSVACLERKESILVSAHTSAGKTAVAEYAIAMAFRDKQRVIYTSPLKALSNQKYRELQHEFKDVGLMTGDVTLSPNASCLVMTTEILRAMLYRGSEVLKEVAWVIFDEIHYMKDRERGVVWEESIIFLPPAIKMVFLSATMSNATEFAEWICYLHKQPCHVVYTDFRPTPLQHYAFPMGGGGLYLVVDDNEQFREDSFVKMQDTFPKPKSNDGKKSANGKSGGRGAKGGGGPGDSDVYKIVKMIMERKFEPVIIFSFSRRECEQHALSMSKLDFNTDEEKEVVEQVFNNAMQCLNEEDRSLPAIELMLPLLQRGIAVHHSGLLPVIKELVELLFQEGLVKALFATETFAMGLNMPAKTVVFTAVKKWDGDSHRYIGSGEYIQMSGRAGRRGKDERGICIIMIDEQMEMNTLRDMMLGKPAPLLSTFRLSYYTILNLLSRAEGQFTAEHVIRHSFHQFQHEKALPDIGNKVSKLEEEAAILNASGEAEVAEYHNLQFDIAKHEKKLMSEIIRPERVLCFLDTGRLVKIREGGTDWGWGVVVNVVKNSSVGTGSASSHGGGYIVDTLLHCSTGFSENGAKPKPCPPRAGEKGEMHVVPVQLPLISALSRLRISVPSDLRPVEARQSILLALQELSSRFPLGFPKLHPVKDMNIQDTEIVDLVSQIEEVEQKLLAHPMHKSEDDQQIKSFQRKAEVNYEIQQLKSKMRDSQLQKFRDELKNRSRVLKKLGHIDADGVVQVKGRAACLIDTGDELLVTELMFNGTFNDLDHHQVAALASCFIPVDKSNEQVNLRNELTKPLQQLQDSARKIAEIQHECKLEIDVEEYVESTIRPFLMDVIYSWSKGASFAEIIQMTDIFEGSIIRSARRLDEFLNQLRAAAEAVGESSLESKFAAASESLRRGIMFANSLYL

SEQ ID NO: 220 - protein, 1196 aa, Arabidopsis thaliana
MGSEGNMKKSVVTQVSIGGFGESTTAKQLTDYLEDEVGIVWRCRLKTSWTPPGSYPNFEIADTSNIPSIDEYKKVEPHAFVHFAVFESAGRAMDAAGQCNLILDGQPLKVSLGPKNPYSLNQRRRTTVPYKLAGITLEIGTLVSRDDFFVSWRAEGVDFLVDPFDNTCKFCFRKSTAFSFKDAVMHAVINCDYKLELLVRDIQTVRQYKTLHGFVLILQLASSPRVWYRTADDDIYDTVPGDLLDDDDPWIRTTDFTQVGAIGRCHSYRVLISPRYENKLRTALDYFRMRRVQEERVRWPPRIRNEPCFGEPVSDHFFCIHHKEGISFEIMFLVNSVLHRGVFNQFQLTERFFDLLRNQPKDVNIASLKHLCTYKRPVFDAYKRLKLVQEWIQKNPKLLGSHEQSEDISEIRRLVITPTRAYCLPPEVELSNRVLRRYKAVAERFLRVTFMDESMQTINSNVLSYFVAPIVKDLTSSSFSQKTYVFKRVKSILTDGFKLCGRKYSFLAFSANQLRDRSAWFFAEDGKTRVSDIKTWMGKFKDKNVAKCAARMGLCFSSTYATVDVMPHEVDTEVPDIERNGYVFSDGIGTITPDLADEVMEKLKLDVHYSPCAYQIRYAGFKGVVARWPSKSDGIRLALRDSMKKFFSKHTILEICSWTRFQPGFLNRQIITLLSVLGVPDEIFWDMQESMLYKLNRILDDTDVAFEVLTASCAEQGNTAAIMLSAGFKPKTEPHLRGMLSSVRIAQLWGLREKSRIFVTSGRWLMGCLDEAGILEHGQCFIQVSKPSIENCFSKHGSRFKETKTDLEVVKGYVAIAKNPCLHPGDVRILEAVDVPQLHHMYDCLIFPQKGDRPHTNEASGSDLDGDLYFVAWDQKLIPPNRKSYPAMHYDAAEEKSLGRAVNHQDIIDFFARNLANEQLGTICNAHVVHADRSEYGAMDEECLLLAELAATAVDFPKTGKIVSMPFHLKPKLYPDFMGKEDYQTYKSNKILGRLYRRVKEVYDEDAEASSEESTDPSAIPYDAVLEIPGFEDLIPEAWGHKCLYDGQLIGLLGQYKVQKEEEIVTGHIWSMPKYTSKKQGELKERLKHSYNSLKKEFRKVFEETIPDHENLSEEEKNILYEKKASAWYHVTYHPEWVKKSLELQDPDESSHAAMLSFAWIAADYLARIKIRSREMGSIDSAKPVDSLAKFLAQRL

SEQ ID NO: 221 - protein, 743 aa, Arabidopsis thaliana
MSDALSAIPAAVHRNLSDKLYEKRKNAALELENIVKNLTSSGDHDKISKVIEMLIKEFAKSPQANHRKGGLIGLAAVTVGLSTEAAQYLEQIVPPVINSFSDQDSRVRYYACEALYNIAKVVRGDFIIFFNKIFDALCKLSADSDANVQSAAHLLDRLVKDIVTESDQFSIEEFIPLLKERMNVLNPYVRQFLVGWITVLDSVPDIDMLGFLPDFLDGLFNMLSDSSHEIRQQADSALSEFLQEIKNSPSVDYGRMAEILVQRAASPDEFTRLTAITWINEFVKLGGDQLVRYYADILGAILPCISDKEEKIRVVARETNEELRSIHVEPSDGFDVGAILSVARRQLSSEFEATRIEALNWISTLLNKHRTEVLCFLNDIFDTLLKALSDSSDDVVLLVLEVHAGVAKDPQHFRQLIVFLVHNFRADNSLLERRGALIVRRMCVLLDAERVYRELSTILEGEDNLDFASTMVQALNLILLTSPELSKLRELLKGSLVNREGKELFVALYTSWCHSPMAIISLCLLAQAYQHASVVIQSLVEEDINVKFLVQLDKLIRLLETPIFTYLRLQLLEPGRYTWLLKTLYGLLMLLPQQSAAFKILRTRLKTVPTYSFSTGNQIGRATSGVPFSQYKHQNEDGDLEDDNINSSHQGINFAVRLQQFENVQNLHRGQARTRVNYSYHSSSSSTSKEVRRSEEQQQQQQQQQQQQQQQQRPPPSSTSSSVADNNRPPSRTSRKGPGQLQL

SEQ ID NO: 222 - protein, 862 aa, Arabidopsis thaliana
MAQFLRRFSSSPMANEDEFQSPVEPSQQQSQDCVSESYLIGFVIANIVGLKYYSGRINGREMVGLVREPLNVYDNNAIRVLNTRSEQVGHIERTVAAVLAPMIDSHTIVVEGIVPNTRSNSNRYRIPCQIHVFAKLEASSTVKSTISRGGLVLISESDTSFGLSEAVVVKEQMGNGDKRSVDKIFKLVDENVKLMGKLVAAEPPREVIKSELFAHQKEGLGWLLHREKSGELPPFWEEKDGEFLNTLTNYRSDKRPDPLRGGVFADDMGLGKTLTLLSLIAFDRYGNASTSTPTEEPLDGEGDKIEKKGKKRGRGKSSESVTRKKLKTDDVVGMNVSQKTTLIVCPPSVISAWITQLEEHTVPGILKVYMYHGGERTDDVNELMKYDIVLTTYGTLAVEESWEDSPVKKMEWLRIILDEAHTIKNANAQQSRVVCKLKASRRWAVTGTPIQNGSFDLYSLMAFLRFEPFSIKSYWQSLIQRPLGQGNKKGLSRLQVLMATISLRRTKEKSLIGLPPKTVETCYVELSPEERQLYDHMEGEAKGVVQNLINNGSLMRNYSTVLSIILRLRQLCDDMSLCPPELRSFTTSTSVEDVTDKPELLQKLVAALQDGEDFDCPICISPPTNIIITRCAHIFCRACILQTLQRSKPLCPLCRGSLTQSDLYNAPPPPPDSSNTDGEDAKSSTKSSKVSALLSLLMASRQENPNTKSVVFSQFRKMLLLLETPLKAAGFTILRLDGAMTVKKRTQVIGEFGNPELTGPVVLLASLKASGTGINLTAASRVYLFDPWWNPAVEEQAMDRIHRIGQKQEVKMIRMIARNSIEERVLELQQKKKNLANEAFKRRQKKDEREVNVEDVVALMSL

SEQ ID NO: 223 - protein, 588 aa, Arabidopsis thaliana
MAEEKKNKKKKSDAKVDSEETGEEFISEHSSMKDKEKKRKKNKRENKDGFTGEDMEITGRESEKLGDEVFIVKKKKKSKKPIRIDSEAVDAVKKKSKKRSKETKADSEAEDDGVEKKSKEKSKETKVDSEAHDGVKRKKKKSKKESGGDVIENTESSKVSDKKKGKRKRDDTDLGAEENIDKEVKRKNNKKKPSVDSDVEDINLDSTNDGKKKRKKKKQSEDSETEENGLNSTKDAKKRRKKKKKKKQSEVSEAEEKSDKSDEDLTTPSTSSKRVKFSDQVEFFPSDDDEGTEDDDEEEVKVVRGKRFTKEEDEMVKNAVLEYIDNHALGDEGIKMVMECKAYPQLKGCWKEITSALPWRTYNSVYHRAHTIFEAGSQGIWTKEDIELVMEFQKTHGNDWKTLADAMGKHRKHVKDAWRRGRLAGKKKGHWMREEYQNLFDLVNKDLRMKAFKEKHSKHGMLKDNIPWMAISDVLETRDHVTCCQKWYEQLISPMVAKGMWANVDDYRLLEELLKLDAACIDDVDWDNLLENRDGEACRKRWNQMIIHIGVPKSKTFAEQVEILSDRYCPDIAEDREDFDNRPYDPED

SEQ ID NO: 224 - protein, 296 aa, Arabidopsis thaliana
MENGESNQENLKSLNHDESLKKPSASSVVVDRLKRDEWSEGAVSTLLEAYESKWVLRNRAKLKGQDWEDVAKHVSSRATHTKSPKTQTQCKNKIESMKKRYRSESATADGSSWPLYPRLDHLLRGTQPQPQPQAVLPLNCSVPLLLLEPPLPAVAHPPQISYGSNGVGKIPKEDGFKPENKPEKDAEMDTDSSTPVVKTKVRGKKVKRRYKEEKEEIAGSIRWLAEVVMRSERARMETMKEIERMRAEAEAKRGELDLKRTEIMANTQLEIARIFAAAASSGQNKGVDSSLRIGRN

SEQ ID NO: 225 - protein, 669 aa, Arabidopsis thaliana
MQGVPGFNTVPNPNHYDKSIVLDIKPLRSLKPVFPNGNQGPPFVGCPPFGPSSSEYSSFFPFGAQQPTHDTPDLNQTQNTPIPSFVPPLRSYRTPTKTNGPSSSSGTKRGVGRPKGTTSVKKKEKKTVANEPNLDVQVVKKFSSDFDSGISAAEREDGNAYLVSSVLMRFDAVRRRLSQVEFTKSATSKAAGTLMSNGVRTNMKKRVGTVPGIEVGDIFFSRIEMCLVGLHMQTMAGIDYIISKAGSDEESLATSIVSSGRYEGEAQDPESLIYSGQGGNADKNRQASDQKLERGNLALENSLRKGNGVRVVRGEEDAASKTGKIYIYDGLYSISESWVEKGKSGCNTFKYKLVRQPGQPPAFGFWKSVQKWKEGLTTRPGLILPDLTSGAESKPVSLVNDVDEDKGPAYFTYTSSLKYSETFKLTQPVIGCSCSGSCSPGNHNCSCIRKNDGDLPYLNGVILVSRRPVIYECGPTCPCHASCKNRVIQTGLKSRLEVFKTRNRGWGLRSWDSLRAGSFICEYAGEVKDNGNLRGNQEEDAYVFDTSRVFNSFKWNYEPELVDEDPSTEVPEEFNLPSPLLISAKKFGNVARFMNHSCSPNVFWQPVIREGNGESVIHIAFFAMRHIPPMAELTYDYGISPTSEARDESLLHGQRTCLCGSEQCRGSFG

SEQ ID NO: 226 - protein, 1706 aa, Arabidopsis thaliana
MNVQAHMSGQRSGQVPNQGTVPQNNGNSQMQNLVGSNGAATAVTGAGAATGSGTGVRPSRNIVGAMDHDIMKLRQYMQTLVFNMLQQRQPSPADAASKAKYMDVARRLEEGLFKMAVTKEDYMNRSTLESRITSLIKGRQINNYNQRHANSSSVGTMIPTPGLSQTAGNPNLMVTSSVDATIVGNTNITSTALNTGNPLIAGGMHGGNMSNGYQHSSRNFSLGSGGSMTSMGAQRSTAQMIPTPGFVNSVTNNNSGGFSAEPTIVPQSQQQQQRQHTGGQNSHMLSNHMAAGVRPDMQSKPSGAANSSVNGDVGANEKIVDSGSSYTNASKKLQQGNFSLLSFCPDDLISGQHIESTFHISGEGYSTTNPDPFDGAITSAGTGTKAHNINTASFQPVSRVNSSLSHQQQFQQPPNRFQQQPNQIQQQQQQFLNQRKLKQQTPQQHRLISNDGLGKTQVDSDMVTKVKCEPGMENKSQAPQSQASERFQLSQLQNQYQNSGEDCQADAQLLPVESQSDICTSLPQNSQQIQQMMHPQNIGSDSSNSFSNLAVGVKSESSPQGQWPSKSQENTLMSNAISSGKHIQEDFRQRITGMDEAQPNNLTEGSVIGQNHTSTISESHNLQNSIGTTCRYGNVSHDPKFKNQQRWLLFLRHARSCKPPGGRCQDQNCVTVQKLWSHMDNCADPQCLYPRCRHTKALIGHYKNCKDPRCPVCVPVKTYQQQANVRALARLKNESSAVGSVNRSVVSNDSLSANAGAVSGTPRCADTLDNLQPSLKRLKVEQSFQPVVPKTESCKSSIVSTTEADLSQDAERKDHRPLKSETMEVKVEIPDNSVQAGFGIKETKSEPFENVPKPKPVSEPGKHGLSGDSPKQENIKMKKEPGWPKKEPGCPKKEELVESPELTSKSRKPKIKGVSLTELFTPEQVREHIRGLRQWVGQSKAKAEKNQAMENSMSENSCQLCAVEKLTFEPPPIYCTPCGARIKRNAMYYTVGGGETRHYFCIPCYNESRGDTILAEGTSMPKAKLEKKKNDEEIEESWVQCDKCQAWQHQICALFNGRRNDGGQAEYTCPYCYVIDVEQNERKPLLQSAVLGAKDLPRTILSDHIEQRLFKRLKQERTERARVQGTSYDEIPTVESLVVRVVSSVDKKLEVKSRFLEIFREDNFPTEFPYKSKVVLLFQKIEGVEVCLFGMYVQEFGSECSNPNQRRVYLSYLDSVKYFRPDIKSANGEALRTFVYHEILIGYLEYCKLRGFTSCYIWACPPLKGEDYILYCHPEIQKTPKSDKLREWYLAMLRKAAKEGIVAETTNLYDHFFLQTGECRAKVTAARLPYFDGDYWPGAAEDIISQMSQEDDGRKGNKKGILKKPITKRALKASGQSDFSGNASKDLLLMHKLGETIHPMKEDFIMVHLQHSCTHCCTLMVTGNRWVCSQCKDFQLCDGCYEAEQKREDRERHPVNQKDKHNIFPVEIADIPTDTKDRDEILESEFFDTRQAFLSLCQGNHYQYDTLRRAKHSSMMVLYHLHNPTAPAFVTTCNVCHLDIESGLGWRCEVCPDYDVCNACYKKEGCINHPHKLTTHPSLADQNAQNKEARQLRVLQLRKMLDLLVHASQCRSPVCLYPNCRKVKGLFRHGLRCKVRASGGCVLCKKMWYLLQLHARACKESECDVPRCGDLKEHLRRLQQQSDSRRRAAVMEMMRQRAAEVAGTSG

SEQ ID NO: 227 - protein, 915 aa, Arabidopsis thaliana
MPSDIMEQRGVSTPSHFHEDIHITSERQFGFMKTDMMPENQGGRDRLSSMPKSSWTSESYQLKPQSSFSGSHPSGSPNARNTTNGSQWESSLFSSSMSDLFSRKLRLQGSDMLSTMSANTVVTHREEEPSESLEEIEAQTIGNLLPDEDDLFAEVTGEVGRKSRANTGDELDEFDLFSSVGGMELDGDIFSSVSHRNGERGGNNSVGELNRGEIPSRTLLVGNISSNVEDYELKVLFEQFGDIQALHTACKNRGFIMVSYCDIRAAQNAARALQNKLLRGTKLDIRYSISKENPSQKDTSKGALLVNNLDSSISNQELNRLVKSYGEVKEIRRTMHDNSQIYIEFFDVRAAAAALGGLNGLEVAGKKLQLVPTYPEGTRYTSQCAANDTEGCLPKTSYSNTSSGHIGRHFPGMISSTSSDGGSMRVIHNSIGSPVNSFIERHRSLSIPIGFPPSANGISASKPVGLQEHGHHFDNSNMGIQSMPNLHPHSFSEYVDNFANGSPYTSSAFSEMVSDGSKANEGFMIHNVRGVEGFSGGGIGSPMHQSSRRPINLWSNSNTQQQNPSSGMMWPNSPSHINSIPTQRPPVTVFSRAPPIMVNMASSPVHHHIGSAPVLNSPFWDRRQAYVAESLESSGFHIGSHGSMGIPGSSPSHPMDIGSHKTFSVGGNRMDVNSQNAVLRSPQQLSHLFPGRSPMGSMPGSFDSPNERYRNLSHRRSESSSSNADKKLYELDVDRILRGEDRRTTLMIKNIPNKYTSKMLLSAIDEHCKGTYDFLYLPIDFKNKCNVGYAFINLIEPEKIVPFFKAFNGKKWEKFNSEKVATLTYARIQGKTALIAHFQNSSLMNEDKRCRPILFHTDGPNAGDQEPFPMGSNIRSRPGKPRSSSIDNYNSFSISSVSENREETPNGTDPFLKEN

SEQ ID NO: 228 - protein, 136 aa, Arabidopsis thaliana; identical to SEQ ID NO: 162

SEQ ID NO: 229 - protein, 1210 aa, Arabidopsis thaliana
MHPKRSSQGDGSVTKPVRTSDRLRRRPKLHGRSYLYYSSPNMLHNRKRNTKTRTAASQIAKMLHKGNRPARASNAAPIASDLRRSTRKRRISVNLEDYTDSSGAEDEDMMSPAYRTLRRRVHKNFSTSKSRKDMDAELAPRREGLRPRRSTTIANKRLKTESGADQDTSEEKDGQDETENGNELDDADDGENEVEAEDEGNGEDEGDGEDEGEEDGDDDEEGDEEQEGRKRYDLRNRAEVRRMPTGEINKQQQPRSPRRVLHQGMGTRVGRDGRRGGSRPHKRHRFTRTDDSDDSLLVDELDQGPAIPWARGGNRSGAPWLFGGLDTYGSSSLGLNVGASGWGHQSDGLAALTSGVQTAGPSSKGGADIQPLQINEDINFDDIGGLSEYINDLKEMVFFPLLYPEFFASYSITPPRGVLLCGPPGTGKTLIARALACAASKAGQKVSFYMRKGADVLSKWVGEAERQLKLLFEEAQRNQPSIIFFDEIDGLAPVRSSKQEQIHNSIVSTLLALMDGLDSRGQVVLIGATNRVDAIDGALRRPGRFDREFNFSLPGCEARAEILDIHTRKWKHPPTRELKEELAATCVGYCGADLKALCTEAAIRAFREKYPQVYTSDDKYAIDVGLVNVEKSHFVEAMSAITPAAHRGSVVQSRPLSPVVLPCLHRHLLESMSLISDIFPSSATSSELTKLSILTFGSAIPLVYRPRLLLLGGEGVGLDHLGPAILHELEKFPIHSLGLPSLLSDPGAKTPEEALVHIFSEARRTTPSILYIPMFNNWWENAHEQLRAVFLTLLEELPSNLPILLLATSYGELSDMEEQSVFDNRSVYTVDKPSSEDRSLFFDRLIEAALSVISGLNGKPDGPQPLPELPKVPKEPTGPKPAEVKAKVEAEQHALRRLRMCLRDVCNRILYDKRFSAFHFPVTDEDAPNYRSIIQIPMDTATLLQRVDTGQYLTCTPFLQDVDLIVRNAKAYNGDDYAGARIVSRAYELRDVVHGMLSQMDPALLTYCDKIAAEGGPSLIPDDLSGSILGLAPVVQMGTVTRTSARLRNVQPEVNLDRDYEGLKKPKKTTDAVSIDSAADKSQNQDSGQEMPSPDAANPQSAAPSPTDGDREDQSEPPSKEASAEDMSGDSCKGPAAKSDKEISSRTESVKGVFMERTDNYSIPQMERLYTRIMKGVLETLDKGLRDDDNNPKHSILRFLSEFAQHQANF

SEQ ID NO: 230 - protein, 533 aa, Arabidopsis thaliana
MKRDHHHHHHQDKKTMMMNEEDDGNGMDELLAVLGYKVRSSEMADVAQKLEQLEVMMSNVQEDDLSQLATETVHYNPAELYTWLDSMLTDLNPPSSNAEYDLKAIPGDAILNQFAIDSASSSNQGGGGDTYTTNKRLKCSNGVVETTTATAESTRHVVLVDSQENGVRLVHALLACAEAVQKENLTVAEALVKQIGFLAVSQIGAMRKVATYFAEALARRIYRLSPSQSPIDHSLSDTLQMHFYETCPYLKFAHFTANQAILEAFQGKKRVHVIDFSMSQGLQWPALMQALALRPGGPPVFRLTGIGPPAPDNFDYLHEVGCKLAHLAEAIHVEFEYRGFVANTLADLDASMLELRPSEIESVAVNSVFELHKLLGRPGAIDKVLGVVNQIKPEIFTVVEQESNHNSPIFLDRFTESLHYYSTLFDSLEGVPSGQDKVMSEVYLGKQICNVVACDGPDRVERHETLSQWRNRFGSAGFAAAHIGSNAFKQASMLLALFNGGEGYRVEESDGCLMLGWHTRPLIATSAWKLSTN

SEQ ID NO: 231 - protein, 175 aa, Arabidopsis thaliana
MSINIRDPLIVSRVVGDVLDPFNRSITLKVTYGQREVTNGLDLRPSQVQNKPRVEIGGEDLRNFYTLVMVDPDVPSPSNPHLREYLHWLVTDIPATTGTTFGNEIVCYENPSPTAGIHRVVFILFRQLGRQTVYAPGWRQNFNTREFAEIYNLGLPVAAVFYNCQRESGCGGRRL

SEQ ID NO: 232 - protein, 1495 aa, Arabidopsis thaliana
MADEEEGENSNKLMLVALTATMTKLLDARLEAFRQEHINSDPDRDRTRREPRDPVDDRDTMSYYSQSSRQTNHRRRRHDREERVLPRDDLAGLKIRIPSFKGTNDPDEYLEWEKKIELVFNCQQYTEESKVKVAPTEFQNYALSWWDQLVTTRRRAGDYPIESWTQMKTIMRKRFVPSHYYRELHNRLRNLVQGNKSVEEYYKEMETLMLRADIQEDNEAIMSRFMGGLNRDIIDRLEVQHYVELEELLHKAIMFEKQLKRRSSKPSFGSGKPSYHKDERSGFQKDYKPFIKPKVEDQDQKGKGKAVMTRTRDIKGFKCQGHGHYASECSNKRIMIIKDTGEIESEDEQLEESSSTEDYEAPSKGELLVTMKALSVIAKTDEQEQRENLFHSSCMVNDKVCSLIIDGGSCTNVASETMVEKLGLKVMKHPRPYKLQWLNEDGEMSVDRQVKVPLSIGKYEDEILCDILPMEASHILLGRPWQSDRKDYTDVFPEENPVGLPPIRGIEHQIDFVPGASLPNRPAYRTNPVETKELEKQVTELMERGHIRESMSPCAVPVLLVPKKDGSWRMCVDCRAINNITVKYRHPIPRLDDMLDELHGSSIFSKVDLKSGYHQIRMKEGDEWKTAFKTIQGLYEWLVMPFGLTNAPSTFMRLMNHVLRAFIGRFVIVYFDDILVYSKSLEEHVEHLKMVLEVLRKEKLYANLKKCTFGTDNLVFLGFVVSTDGVKVDEEKVKAIREWPSPKSVGEVRSFHGLAGFYRRFVKDFSTLAAPLTEVIKKNVGFKWEQAQEDAFQALKEKLTHAPVLSLPDFLKTFEIECDASGVGIGVVLMQDKKPIAYFSEKLGGATLNYPTYDKELYALVRALQTGQHYLWPKEFVIHTDHESLKHLKGQQKLNKRHARWVEFIETFPYVIKYKKGKDNVVADALSRRYVLLSSLDAKLLGFEHIKSLYANDSDFEKIYSSCEKFAFGKYYRHDGFLFYDNRLCIPNSSLRELFIREAHGGGLMGHFGVSKTIKVMQDHFHWPHMKRDVERICERCPTCKQAKAKSQPHGLYTPLPIPSHPWNDISMDFVVGLPRTRTGKDSIFVVVDRFSKMAHFIPCHKTDDAIHIANLFFREVVRLHGMPKTIVSDRDTKFLSYFWKTLWSKLGTKLLFSTTCHPQTDGQTEVVNRTLSTLLRALIKKNLKTWEDCLPHVEFAYNHSMHSASKFSPFQIVYGFNPTTPLDLMPLPLSERVSLDGKKKAELVQQIHEQAKKNIEEKTKQYAKHANKSRKEVIFNEGDLVWIHLRKERFPKERKSKLMSRIDGPFKVLKRINNNAYSLDLQGKYNVSNSFNVADLFPFIADNTDLRSNPFQLGEDDVIMTSLDHGADEIMTSLDHGADEIMTSLDHGDDVIMTSLDHGAKEQFEGGKVINHSIKHAVEDLRELESNDSMDYSTQHEDELLGATKKEAMHVLNGPMTRSKTRLLNQDITTLLQHIEGSLKQDACQTTLVVIQAV

SEQ ID NO: 233 - protein, 1292 aa, Arabidopsis thaliana
MDADAMETETTDQVSASPLHFARSYQVEALEKAIKQNTIVFLETGSGKTLIAIMLLRSYAYLFRKPSPCFCVFLVPQVVLVTQQAEALKMHTDLKVGMYWGDMGVDFWDSSTWKQEVDKYEVLVMTPAILLDALRHSFLSLSMIKVLIVDECHHAGGKHPYACIMREFYHKELNSGTSNVPRIFGMTASLVYTCENESVLAGFVPFSTPSFKYYQHIKIPSPKRASLVEKLERLTIKHRLSLGTLDLNSSTVDSVEKRLLRISSTLTYCLDDLGILLAQKAAQSLSASQNDSFLWGELNMFSVALVKKFCSDASQEFLAEIPQGLNWSVANINGNAEAGLLTLKTVCLIETLLGYSSLENIRCIIFVDRVITAIVLESLLAEILPNCNNWKTKYVAGNNSGLQNQTRKKQNEIVEDFRRGLVNIIVATSILEEGLDVQSCNLVIRFDPASNICSFIQSRGRARMQNSDYLMMVERMREESLDHSLVPCPPLPDDSDEPLFRVESTGATVTLSSSVSLIYHYCSRLPSDEYFKPAPRFDVNKDQGSCTLYLPKSCPVKEVKAEANNKVLKQAVCLKACIQLHKVGALSDHLVPDMVVAETVSQKLGTRVVLEDDIGNTSFRLEDHRGTIAVTLSYVGAFHLTQEEVLFCRRFQITLFRVLLDHSVENLMEALNGLHLRDGVALDYLLVPSTHSHETSLIDWEVIRSVNLTSHEVLEKHENCSTNGASRILHTKDGLFCTCVVQNALVYTPHNGYVYCTKGVLNNLNGNSLLTKRNSGDQTYIEYYEERHGIQLNFVDEPLLNGRHIFTLHSYLHMAKKKKEKEHDREFVELPPELCHVILSPISVDMIYSYTFIPSVMQRIESLLIAYNLKKSIPKVNIPTIKVLEAITTKKCEDQFHLESLETLGDSFLKYAVCQQLFQHCHTHHEGLLSTKKDGMISNVMLCQFGCQQKLQGFIRDECFEPKGWMVPGQSSAAYSLVNDTLPESRNIYVASRRNLKRKSVADVVESLIGAYLSEGGELAALMFMNWVGIKVDFTTTKIQRDSPIQAEKLVNVGYMESLLNYSFEDKSLLVEALTHGSYMMPEIPRCYQRLEFLGDSVLDYLITKHLYDKYPCLSPGLLTDMRSASVNNECYALVAVKANLHKHILYASHHLHKHISRTVSEFEQSSLQSTFGWESDISFPKVLGDVIESLAGAIFVDSGYNKEVVFASIKPLLGCMITPETVKLHPVRELTELCQKWQFELSKAKDFDSFTVEVKAKEMSFAHTAKASDKKMAKKLAYKEVLNLLKNSLDY

SEQ ID NO: 234 - protein, 1384 aa, Arabidopsis thaliana
MSSLVERLRIRSDRKPVYNLDDSDDDDFVPKKDRTFEQVEAIVRTDAKENACQACGESTNLVSCNTCTYAFHAKCLVPPLKDASVENWRCPECVSPLNEIDKILDCEMRPTKSSEQGSSDAEPKPIFVKQYLVKWKGLSYLHCSWVPEKEFQKAYKSNHRLKTRVNNFHRQMESFNNSEDDFVAIRPEWTTVDRILACREEDGELEYLVKYKELSYDECYWESESDISTFQNEIQRFKDVNSRTRRSKDVDHKRNPRDFQQFDHTPEFLKGLLHPYQLEGLNFLRFSWSKQTHVILADEMGLGKTIQSIALLASLFEENLIPHLVIAPLSTLRNWEREFATWAPQMNVVMYFGTAQARAVIREHEFYLSKDQKKIKKKKSGQISSESKQKRIKFDVLLTSYEMINLDSAVLKPIKWECMIVDEGHRLKNKDSKLFSSLTQYSSNHRILLTGTPLQNNLDELFMLMHFLDAGKFGSLEEFQEEFKDINQEEQISRLHKMLAPHLLRRVKKDVMKDMPPKKELILRVDLSSLQKEYYKAIFTRNYQVLTKKGGAQISLNNIMMELRKVCCHPYMLEGVEPVIHDANEAFKQLLESCGKLQLLDKMMVKLKEQGHRVLIYTQFQHMLDLLEDYCTHKKWQYERIDGKVGGAERQIRIDRFNAKNSNKFCFLLSTRAGGLGINLATADTVIIYDSDWNPHADLQAMARAHRLGQTNKVMIYRLINRGTIEERMMQLTKKKMVLEHLVVGKLKTQNINQEELDDIIRYGSKELFASEDDEAGKSGKIHYDDAAIDKLLDRDLVEAEEVSVDDEEENGFLKAFKVANFEYIDENEAAALEAQRVAAESKSSAGNSDRASYWEELLKDKFELHQAEELNALGKRKRSRKQLVSIEEDDLAGLEDVSSDGDESYEAESTDGEAAGQGVQTGRRPYRRKGRDNLEPTPLMEGEGRSFRVLGFNQSQRAIFVQTLMRYGAGNFDWKEFVPRLKQKTFEEINEYGILFLKHIAEEIDENSPTFSDGVPKEGLRIEDVLVRIALLILVQEKVKFVEDHPGKPVFPSRILERFPGLRSGKIWKEEHDKIMIRAVLKHGYGRWQAIVDDKELGIQELICKELNFPHISLSAAEQAGLQGQNGSGGSNPGAQTNQNPGSVITGNNNASADGAQVNSMFYYRDMQRRLVEFVKKRVLLLEKAMNYEYAEEYYGLGGSSSIPTEEPEAEPKIADTVGVSFIEVDDEMLDGLPKTDPITSEEIMGAAVDNNQARVEIAQHYNQMCKLLDENARESVQAYVNNQPPSTKVNESFRALKSINGNINTILSITSDQSKSHEDDTKPDLNNVEMKDTAEETKPLRGGVVDLNVVEGEENIAEASGSVDVKMEEAKEEEKPKNMVVD

SEQ ID NO: 235 - protein, 400 aa, Arabidopsis thaliana
MSVHVKEEPVLVPNCDVENTELAVFNGNGESELENFGTCVDEITDRVNQLEQKVVEVEHFYSTKDGAAQTNTSKSNSGGKKIAISQPNNSKGNSAGKEKSKGKHVSSPDLMRQFATMFRQIAQHKWAWPFLEPVDVKGLGLHDYYKVIEKPMDLGTIKKKMESSEYSNVREIYADVRLVFKNAMRYNEEKEDVYVMAESLLEKFEEKWLLIMPKLVEEEKKQVDEEAEKHANKQLTMEAAQAEMARDLSNELYEIDLQLEKLRESVVQRCRVRNRVFGVVLEINRKLSTQEKKGLSAALGRLSPEDLSKALKMVSESNPSFPAGAPEVELDIDVQTDVTLWRLKVFVQEALKAANKSSGGTNAQNNNNTGTGEINKNNAKRRREISDAINKASIKRAKKA

SEQ ID NO: 236 - protein, 794 aa, Arabidopsis thaliana
MVHSESSILSSLRGGDGGGIPCSKDELAINGSYTDPMGRRKSKRFKVAAESEFSPDFGSITRQLRSRRMQKEFTVETYETRNVSDVCVLSSQADVELIPGEIVAERDSFKSVDCNDMSVGLTEGAESLGVNMQEPMKDRNMPENTSEQNMVEVHPPSISLPEEDMMGSVCRKSITGTKELHGRTISVGRDLSPNMGSKFSKNGKTAKRSISVEEENLVLEKSDSGDHLGPSPEVLELEKSEVWIITDKGVVMPSPVKPSEKRNGDYGEGSMRKNSERVALDKKRLASKFRLSNGGLPSCSSSGDSARYKVKETMRLFHETCKKIMQEEEARPRKRDGGNFKVVCEASKILKSKGKNLYSGTQIIGTVPGVEVGDEFQYRMELNLLGIHRPSQSGIDYMKDDGGELVATSIVSSGGYNDVLDNSDVLIYTGQGGNVGKKKNNEPPKDQQLVTGNLALKNSINKKNPVRVIRGIKNTTLQSSVVAKNYVYDGLYLVEEYWEETGSHGKLVFKFKLRRIPGQPELPWKEVAKSKKSEFRDGLCNVDITEGKETLPICAVNNLDDEKPPPFIYTAKMIYPDWCRPIPPKSCGCTNGCSKSKNCACIVKNGGKIPYYDGAIVEIKPLVYECGPHCKCPPSCNMRVSQHGIKIKLEIFKTESRGWGVRSLESIPIGSFICEYAGELLEDKQAESLTGKDEYLFDLGDEDDPFTINAAQKGNIGRFINHSCSPNLYAQDVLYDHEEIRIPHIMFFALDNIPPLQELSYDYNYKIDQVYDSNGNIKKKFCYCGSAECSGRLY

SEQ ID NO: 237 - protein, 2044 aa, Arabidopsis thaliana
MASKGGKSKPDIVMASKSGKSKPDNESRAKRQKTLEAPKEPRRPKTHWDHVLEEMAWLSKDFESERKWKLAQAKKVALRASKGMLDQASREERKLKEEEQRLRKVALNISKDMKKFWMKVEKLVLYKHQLVRNEKKKKAMDKQLEFLLGQTERYSTMLAENLVEPYKQGQNTPSKPLLTIESKSDEERAEQIPPEINSCLESGSPELDEDYDLKSEDETDEKHFTKRERQEELEALQNEVDLPVEELLRRYTSGRVSRETSPVKDENEDNLTSVSRVTSPVKDENQDNLASVGQDHGEDKNNLAASEETEGNPSVRRSNDSYGHLAISETHSHDLEPGMTTASVKSRKEDHTYDFNDEQEDVDFVLANGEEKDDEATLAVEEELAKADNEDHVEEIALLQKESEMPIEVLLARYKEDFGGKDISEDESESSFAVSEDSIVDSDENRQQADLDDDNVDLTECKLDPEPCSENVEGTFHEVAEDNDKDSSDKIADAAAAARSAQPTGFTYSTTKVRTKLPFLLKHSLREYQHIGLDWLVTMYEKKLNGILADEMGLGKTIMTIALLAHLACDKGIWGPHLIVVPTSVMLNWETEFLKWCPAFKILTYFGSAKERKLKRQGWMKLNSFHVCITTYRLVIQDSKMFKRKKWKYLILDEAHLIKNWKSQRWQTLLNFNSKRRILLTGTPLQNDLMELWSLMHFLMPHVFQSHQEFKDWFCNPIAGMVEGQEKINKEVIDRLHNVLRPFLLRRLKRDVEKQLPSKHEHVIFCRLSKRQRNLYEDFIASTETQATLTSGSFFGMISIIMQLRKVCNHPDLFEGRPIVSSFDMAGIDVQLSSTICSLLLESPFSKVDLEALGFLFTHLDFSMTSWEGDEIKAISTPSELIKQRVNLKDDLEAIPLSPKNRKNLQGTNIFEEIRKAVFEERIQESKDRAAAIAWWNSLRCQRKPTYSTSLRTLLTIKGPLDDLKANCSSYMYSSILADIVLSPIERFQKMIELVEAFTFAIPAARVPSPTCWCSKSDSPVFLSPSYKEKVTDLLSPLLSPIRPAIVRRQVYFPDRRLIQFDCGKLQELAMLLRKLKFGGHRALIFTQMTKMLDVLEAFINLYGYTYMRLDGSTPPEERQTLMQRFNTNPKIFLFILSTRSGGVGINLVGADTVIFYDSDWNPAMDQQAQDRCHRIGQTREVHIYRLISESTIEENILKKANQKRVLDNLVIQNGEYNTEFFKKLDPMELFSGHKALTTKDEKETSKHCGADIPLSNADVEAALKQAEDEADYMALKRVEQEEAVDNQEFTEEPVERPEDDELVNEDDIKADEPADQGLVAAGPAKEEMSLLHSDIRDERAVITTSSQEDDTDVLDDVKQMAAAAADAGQAISSFENQLRPIDRYAIRFLELWDPIIVEAAMENEAGFEEKEWELDHIEKYKEEMEAEIDDGEEPLVYEKWDADFATEAYRQQVEVLAQHQLMEDLENEAREREAAEVAEMVLTQNESAHVLKPKKKKKAKKAKYKSLKKGSLAAESKHVKSVVKIEDSTDDDNEEFGYVSSSDSDMVTPLSRMHMKGKKRDLIVDTDEEKTSKKKAKKHKKSLPNSDIKYKQTSALLDELEPSKPSDSMVVDNELKLTNRGKTVGKKFITSMPIKRVLMIKPEKLKKGNLWSRDCVPSPDSWLPQEDAILCAMVHEYGPNWNFVSGTLYGMTAGGAYRGRYRHPAYCCERYRELIQRHILSASDSAVNEKNLNTGSGKALLKVTEENIRTLLNVAAEQPDTEMLLQKHFSCLLSSIWRTSTRTGNDQMLSLNSPIFNRQFMGSVNHTQDLARKPWQGMKVTSLSRKLLESALQDSGPSQPDNTISRSRLQETQPINKLGLELTLEFPRGNDDSLNQFPPMISLSIDGSDSLNYVNEPPGEDVLKGSRVAAENRYRNAANACIEDSFGWASNTFPANDLKSRTGTKAQSLGKHKLSASDSAKSTKSKHRKLLAEQLEGAWVRPNDPNLKFDFTPGDREEEEEQEVDEKANSAEIEMISCSQWYDPFFTSGLDDCSLASDISEIE

SEQ ID NO: 238 - protein, 1499 aa, Arabidopsis thaliana
MVTTRSQEGDGKGKEVELEVPLDSRVTRLETTVAEQHKEMMKQFADLYAVLSRSTAGKMVDEQSTLDRSAPRSSQSMENRSGYPDPYRDARHQQVRSDHFNAYNNLTRLGKIDFPRFDGTRLKEWLFKVEEFFGVDSTPEDMKVKMAAIHFDSHASTWHQSFIQSGVGLEVLYDWKGYVKLLKERFEDDCDDPMAELKHLQETDGIIDYHQKFELIKTRVNLSEEYLVSVYLAGLRTDTQMHVRMFQPQTVRHCLFLGKTYEKAHPKKPANTTWSTNRSAPTGGYNKYQKEGESKTDHYGNKGNFKPVSQQPKKMSQQEMSDRRSKGLCYFCDEKYTPEHYLVHKKTQLFRMDVDEEFEDAREELVNDDDEHMPQISVNAVSGIAGYKTMRVKGTYDKKIIFILIDSGSTHNFLDPNTAAKLGCKVDTAGLTRVSVADGRKLRVEGKVTDFSWKLQTTTFQSDILLIPLQGIDMVLGVQWLETLGRISWEFKKLEMRFKFNNQKVLLHGLTSGSVREVKAQKLQKLQEDQVQLAMLCVQEVSESTEGELCTINALTSELGEESVVEEVLNEYPDIFIEPTALPPFREKHNHKIKLLEGSNPVNQRPYRYSIHQKNEIDKLVEDLLTNGTVQASSSPYASPVVLVKKKDGTWRLCVDYRELNGMTVKDSFPIPLIEDLMDELGGAVIFSKIDLRAGYHQVRMDPDDIQKTAFKTHSGHFEYLVMPFGLTNAPATFQGLMNFIFKPFLRKFVLVFFDDILVYSSSLEEHRQHLKQVFEVMRANKLFAKLSKCAFAVPKVEYLGHFISAQGIETDPAKIKAVKEWPQPTTLKQLRGFLGLAGYYRRFVRSFGVIAGPLHALTKTDAFEWTAVAQQAFEDLKAALCQAPVLSLPLFDKQFVVETDACGQGIGAVLMQEGHPLAYISRQLKGKQLHLSIYEKELLAVIFAVRKWRHYLLQSHFIIKTDQRSLKYLLEQRLNTPIQQQWLPKLLEFDYEIQYRQGKENVVADALSRVEGSEVLHMAMTVVECDLLKDIQAGYANDSQLQDIITALQRDPDSKKYFSWSQNILRRKSKIVVPANDNIKNTILLWLHGSGVGGHSGRDVTHQRVKGLFYWKGMIKDIQAYIRSCGTCQQCKSDPAASPGLLQPLPIPDTIWSEVSMDFIEGLPVSGGKTVIMVVVDRLSKAAHFIALSHPYSALTVAHAYLDNVFKLHGCPTSIVSDRDVVFTSEFWREFFTLQGVALKLTSAYHPQSDGQTEVVNRCLETYLRCMCHDRPQLWSKWLALAEYWYNTNYHSSSRMTPFEIVYGQVPPVHLPYLPGESKVAVVARSLQEREDMLLFLKFHLMRAQHRMKQFADQHRTEREFEIGDYVYVKLQPYRQQSVVMRANQKLSPKYFGPYKIIDRCGEVAYKLALPSYSQVHPVFHVSQLKVLVGNVSTTVHLPSVMQDVFEKVPEKVVERKMVNRQGKAVTKVLVKWSNEPLEEATWEFLFDLQKTFPEFEA

SEQ ID NO: 239 - protein, 130 aa, Arabidopsis thaliana
MAGRGKTLGSGGAKKATSRSSKAGLQFPVGRIARFLKAGKYAERVGAGAPVYLAAVLEYLAAEVLELAGNAARDNKKTRIVPRHIQLAVRNDEELSKLLGDVTIANGGVMPNIHNLLLPKKAGASKPQED

SEQ ID NO: 240 - protein, 2176 aa, Arabidopsis thaliana
MEPTDSTNEQLGDTKTAAVKEESRSFLGIDLNEIPTGATLGGGCTAGQDDDGEYEPVEVVRSIHDNPDPAPGAPAEVPEPDRDASCGACGRPESIELVVVCDACERGFHMSCVNDGVEAAPSADWMCSDCRTGGERSKLWPLGVKSKLILDMNASPPSDAEGYGAEETSDSRKHMLASSSCIGNSFDYAMMHSSFSSLGRGHASLEASGLMSRNTKMSMDALGSHNLGFGFPLNLNNSSLPMRFPSLDPSELFLQNLRHFISERHGVLEDGWRVEFRQPLNGYQLCAVYCAPNGKTFSSIQEVACYLGLAINGNYSCMDAEIRNENSLLQERLHTPKRRKTSRWPNNGFPEQKGSSVSAQLRRFPFNGQTMSPFAVKSGTHFQAGGSLSSGNNGCGCEEAKNGCPMQFEDFFVLSLGRIDIRQSYHNVNVIYPIGYKSCWHDKITGSLFTCEVSDGNSGPIFKVTRSPCSKSFIPAGSTVFSCPKIDEMVEQNSDKLSNRRDSTQERDDDASVEILLSEHCPPLGDDILSCLREKSFSKTVNSLRSEVDSSRVDFDKNLSYDQDHGVEIGDIVVEEDSLSDAWKKVSQKLVDACSIVLKQKGTLNFLCKHVDRETSEINWDTMNEKDNVILSLSKFCCSLAPCSVTCGEKDKSEFAAVVDALSRWLDQNRFGLDADFVQEMIEHMPGAESCTNYRTLKSRSSSSVPITVAEGALVVKPKGGENVKDEVFGEISRKAKKPKLNGGHGVRNLHPPPGRPMCLRLPPGLVGDFLQVSEVFWRFHEILGFEEAFSPENLEQELINPVFDGLFLDKPGKDDKRSEINFTDKDSTATKLFSLFDESRQPFPAKNTSASELKEKKAGDSSDFKISDSSRGSCVGALLTRAHISLLQVLICELQSKVAAFVDPNFDSGESRSRRGRKKDDSTLSAKRNKLHMLPVNEFTWPELARRYILSLLSMDGNLESAEIAARESGKVFRCLQGDGGLLCGSLTGVAGMEADSMLLAEAIKKISGSLTSENDVLSVEDDDSDGLDATETNTCSGDIPEWAQVLEPVKKLPTNVGTRIRKCVYEALERNPPEWAKKILEHSISKEIYKGNASGPTKKAVLSLLADIRGGDLVQRSIKGTKKRTYISVSDVIMKKCRAVLRGVAAADEDKVLCTLLGRKLLNSSDNDDDGLLGSPAMVSRPLDFRTIDLRLAAGAYDGSTEAFLEDVLELWSSIRVMYADQPDCVDLVATLSEKFKSLYEAEVVPLVQKLKDYRKLECLSAEMKKEIKDIVVSVNKLPKAPWDEGVCKVCGVDKDDDSVLLCDTCDAEYHTYCLNPPLIRIPDGNWYCPSCVIAKRMAQEALESYKLVRRRKGRKYQGELTRASMELTAHLADVMEEKDYWEFSAEERILLLKLLCDELLSSSLVHQHLEQCAEAIIEMQQKLRSLSSEWKNAKMRQEFLTAKLAKVEPSILKEVGEPHNSSYFADQMGCDPQPQEGVGDGVTRDDETSSTAYLNKNQGKSPLETDTQPGESHVNFGESKISSPETISSPGRHELPIADTSPLVTDNLPEKDTSETLLKSVGRNHETHSPNSNAVELPTAHDASSQASQELQACQQDLSATSNEIQNLQQSIRSIESQLLKQSIRRDFLGTDASGRLYWGCCFPDENPRILVDGSISLQKPVQADLIGSKVPSPFLHTVDHGRLRLSPWTYYETETEISELVQWLHDDDLKERDLRESILWWKRLRYGDVQKEKKQAQNLSAPVFATGLETKAAMSMEKRYGPCIKLEMETLKKRGKKTKVAEREKLCRCECLESILPSMIHCLICHKTFASDDEFEDHTESKCIPYSLATEEGKDISDSSKAKESLKSDYLNVKSSAGKDVAEISNVSELDSGLIRYQEEESISPYHFEEICSKFVTKDCNRDLVKEIGLISSNGIPTFLPSSSTHLNDSVLISAKSNKPDGGDSGDQVIFAGPETNVEGLNSESNMSFDRSVTDSHGGPLDKPSGLGFGFSEQKNKKSSGSGLKSCCVVPQAALKRVTGKALPGFRFLKTNLLDMDVALPEEALRPSKSHPNRRRAWRVFVKSSQSIYELVQATIVVEDMIKTEYLKNEWWYWSSLSAAAKISTLSALSVRIFSLDAAIIYDKPITPSNPIDETKPIISLPDQKSQPVSDSQERSSRVRRSGKKRKEPEGS

SEQ ID NO: 241 - protein, 396 aa, Arabidopsis thaliana
MVLLSFSLRFIAFTLTITLTQIADGFQSRMLMNNGLALSPQMGWNSWNHFQCNINETLIKQTADAMVSSGLSAIGYKYINIDDCWGELKRDSQGSLVAKASTFPSGIKALSDYVHSKGLKLGIYSDAGTLTCSQTMPGSLGHEEQDAKTFASWGIDYLKYDNCENTGTSPRERYPKMSKALLNSGRSIFFSLCEWGQEDPATWAGDIGNSWRTTGDIQDNWKSMTLIADQNDRWASYARPGSWNDPDMLEVGNGGMTKEEYMSHFSIWALAKAPLLIGCDLRSMDKVTFELLSNKEVIAVNQDKLGIQGKKVKKEGDLEVWAGPLSKKRVAVILWNRGSASANITARWAEIGLNSSDIVNARDLWEHSTYSCVKKQLSALVEPHACKMYTLTRRKA

SEQ ID NO: 242 - protein, 1090 aa, Arabidopsis thaliana
MAENTASHRRKPRSLNDRHYSILQDLSAPPRQPPSSSHGEDEETKKSMIKLAGRRRLCKALPKEDEADGYDDPDLVDFYSPVKGETSLDSAGIGNKFTSWDESKEANTELAGEPNFSIITDFCSPSPQLKQKEEMQGDGGRNEIMGILDDLTSKLGTMSIQKKKDSQSNDFDACGVKSQVDKFDFEDAKSSFSLLSDLSKSSPDVVTTYNAGVNSIKDKQGKSGFAIREEQTSKEFSREWEERISNVGKQNSYSGRHFDDNSEDNRQGYNLDRGKSQCKEVDQSMKTTRHIEVSEKIRTVGRSNAAKLRDLDEDDDDDDCLILSGKKAAEMKINKPARSYNAKRHGYDERSLEDEGSITLTGLNLSYTLPGKIATMLYPHQREGLNWLWSLHTQGKGGILGDDMGLGKTMQICSFLAGLFHSKLIKRALVVAPKTLLPHWMKELATVGLSQMTREYYGTSTKAREYDLHHILQGKGILLTTYDIVRNNTKALQGDDHYTDEDDEDGNKWDYMILDEGHLIKNPNTQRAKSLLEIPSSHRIIISGTPIQNNLKELWALFNFSCPGLLGDKNWFKQNYEHYILRGTDKNATDREQRIGSTVAKNLREHIQPFFLRRLKSEVFGDDGATSKLSKKDEIVVWLRLTACQRQLYEAFLNSEIVLSAFDGSPLAALTILKKICDHPLLLTKRAAEDVLEGMDSTLTQEEAGVAERLAMHIADNVDTDDFQTKNDSISCKLSFIMSLLENLIPEGHRVLIFSQTRKMLNLIQDSLTSNGYSFLRIDGTTKAPDRLKTVEEFQEGHVAPIFLLTSQVGGLGLTLTKADRVIVVDPAWNPSTDNQSVDRAYRIGQTKDVIVYRLMTSATVEEKIYRKQVYKGGLFKTATEHKEQIRYFSQQDLRELFSLPKGGFDVSPTQQQLYEEHYNQIKLDEKLESHVKFLETLGIAGVSHHSLLFSKTAPIQAIQKDEEEQIRRETALLLGRASASISQDTVINGADYAFKPKDVNLDKRINISPVDDKELSESVIKARLNRLTMLLQNKGTVSRLPDGGAKIQKQIAELTRELKDMKAAERINMPQVIDLEEDISRKMQKGLNL

SEQ ID NO: 243 - protein, 1607 aa, Arabidopsis thaliana
MDWIHKSTPFMEPSNLAKLVQGNVPLQPHDSHSSLTDLDMDLREVYFLILHFLSIGPCERTFGHLRDEILEKGLLPRRYHSWWSRSGIYSGRADDDGISLPLSYDNLIERYPHIEKDHLVKLLKQLILNPSFPSHMRVEGNAPNAADVPTLLGSGTFSLVDRSNSYSSTLSNMFLWIWDLKKSHICIEPDSGSKALHFRNLFFWLWQSLLGIMTCIGNSGEVAHIGEVKSRGNNIESQKARHVASYLRWPHMHADQVRGLSLREIGGGFRKHHRAPSILSACHAIAKPSTMVQKMQNIKKLRGHRNAVYCAIFDRSGRYVITGSDDRLVKIWSMETALCLASCRGHEGDITDLAVSSNNALVASASNDFVIRVWRLPDGMPISVLRGHTGAVTAIAFSPRQASVYQLLSSSDDGTCRIWDARYSQWLPRIYVPSPSDANTGSLEVSLLGESTFTSSNTGSTSNASQSHQILCCAYNANGTIFVTGSSDSNARVWSASKPNLDDAEQPTHELDVLRGHENDVNYVQFSGCAVAPKSSTADALKEDSYPKFKNSWFCHDNIVTCSRDGSAIIWTPRSRKFHGKSGRWMKGYHLKVPPPPLPPQPPRGGPRQRFLPTPRGVNMIIWSLDNRFVLAAIMDCRICVWNAADGSLVHCLTGHSESSYVLDVHPFNPRIAMSAGYDGKTIIWDIWEGIPIKVYEIGRFKLVDGKFSQDGTSIVLSDDVGQIYFLNTGQGESQKNAKYDQFFLGDYRPLIRDTNGHVLDQETQLLPHRRNLQDLLCDSSMIPYPEPDQTMFQQRRLGALGVEWRPSSIKFSVGPDFSLGQDYIMPPLADLDRLIEPLPEFIDAMYWEPEHEVLSDDNDSEYNAEVSSDGARASPCSNSSNELECSSEDSDVENIHESSYHWKRRRKHPKVNVSTSSGRRDKRILDENDSSNSGIKRTKNRRIVVKASKRKHSDVKASRPQRAAAQNARSLLSKISGSSSDEVDDDNDSSNSESDRSIPTLRQLDKPSQMLESLSNDKQKKRLIVKISVKKPAESMGSKGDVINQADLEQLSSKPLEENHRVIGIYSREPGSSSVDAKGDSGCQSIPYSMNTPQREKADNQLIRSSDQDQNMCKWREEIPVCEPTELTAPENIEEAQPFYGDEADEILPKKVRRLRLKLRHPNSPRKLEPDEVADDLADGGDGFASIAPSFMNPIMDSEPVIDSVRDSSAHNFEFGEATADVIRRKRSIRSESSTRNSALRIRLGSGSVDKIKKQGIPSTSVYDDASLEEWPSTSKAGSRSRSASVSKPSLHTGIRLNSVSGKISWLLLSEHEEGCRYIPQLGDEVIYFKQGHQEFLKTKELNDRDRSRYLPRNLGAVEICKVEKLNYDTYPGSGDSCCKMTLRVLDSSSSHASRKEFQLTLPELINFPDFIVEKTRYDAAIQTNWKIGNECRVWWRDATGEGGAWWEGRIESSQVKSTDFPESPWERYRVVYETGETSLHSPWEFDNPEFPWEKSTIEDERREKLLSLFAGLVKSISKHQDSYGIQKLNEAAQKMDFCNRFPVPLYPELIHERLENQYYRSIESFKHDVDAMLSNAELYFVRSAHMLSKIKRLRDKLTKTLRKLI

SEQ ID NO: 244 - protein, 914 aa, Arabidopsis thaliana
MVGLEDDTERERSPVVENGFSNGSRSSSSSAGVLSPSRKVTQGNDTLSYANILRARNKFADALALYEAMLEKDSKNVEAHIGKGICLQTQNKGNLAFDCFSEAIRLDPHNACALTHCGILHKEEGRLVEAAESYQKALMADASYKPAAECLAIVLTDLGTSLKLAGNTQEGIQKYYEALKIDPHYAPAYYNLGVVYSEMMQYDNALSCYEKAALERPMYAEAYCNMGVIYKNRGDLEMAITCYERCLAVSPNFEIAKNNMAIALTDLGTKVKLEGDVTQGVAYYKKALYYNWHYADAMYNLGVAYGEMLKFDMAIVFYELAFHFNPHCAEACNNLGVLYKDRDNLDKAVECYQMALSIKPNFAQSLNNLGVVYTVQGKMDAAASMIEKAILANPTYAEAFNNLGVLYRDAGNITMAIDAYEECLKIDPDSRNAGQNRLLAMNYINEGLDDKLFEAHRDWGWRFTRLHPQYTSWDNLKDPERPITIGYISPDFFTHSVSYFIEAPLTHHDYTKYKVVVYSAVVKADAKTYRFRDKVLKKGGVWKDIYGIDEKKIASMVREDKIDILVELTGHTANNKLGTMACRPAPVQVTWIGYPNTTGLPTVDYRITDSLADPPDTKQKQVEELVRLPDCFLCYTPSPEAGPVCPTPALSNGFVTFGSFNNLAKITPKVLQVWARILCAVPNSRLVVKCKPFCCDSIRQRFLTTLEQLGLESKRVDLLPLILFNHDHMQAYSLMDISLDTFPYAGTTTTCESLYMGVPCVTMAGSVHAHNVGVSLLTKVGLGHLVAKNEDEYVQLSVDLASDVTALSKLRMSLRDLMAGSPVCNGPSFAVGLESAYRNMWKKYCKGEVPSLRRMEMLQKEVHDDPLISKDLGPSRVSVTGEATPSLKANGSAPVPSSLPTQSPQLSKRMDSTS

SEQ ID NO: 245 - protein, 1173 aa, Arabidopsis thaliana
MASSSSSERWIDGLQFSSLLWPPPRDPQQHKDQVVAYVEYFGQFTSEQFPDDIAELVRHQYPSTEKRLLDDVLAMFVLHHPEHGHAVILPIISCLIDGSLVYSKEAHPFASFISLVCPSSENDYSEQWALACGEILRILTHYNRPIYKTEQQNGDTERNCLSKATTSGSPTSEPKAGSPTQHERKPLRPLSPWISDILLAAPLGIRSDYFRWCSGVMGKYAAGELKPPTIASRGSGKHPQLMPSTPRWAVANGAGVILSVCDDEVARYETATLTAVAVPALLLPPPTTSLDEHLVAGLPALEPYARLFHRYYAIATPSATQRLLLGLLEAPPSWAPDALDAAVQLVELLRAAEDYASGVRLPRNWMHLHFLRAIGIAMSMRAGVAADAAAALLFRILSQPALLFPPLSQVEGVEIQHAPIGGYSSNYRKQIEVPAAEATIEATAQGIASMLCAHGPEVEWRICTIWEAAYGLIPLNSSAVDLPEIIVATPLQPPILSWNLYIPLLKVLEYLPRGSPSEACLMKIFVATVETILSRTFPPESSRELTRKARSSFTTRSATKNLAMSELRAMVHALFLESCAGVELASRLLFVVLTVCVSHEAQSSGSKRPRSEYASTTENIEANQPVSNNQTANRKSRNVKGQGPVAAFDSYVLAAVCALACEVQLYPMISGGGNFSNSAVAGTITKPVKINGSSKEYGAGIDSAISHTRRILAILEALFSLKPSSVGTPWSYSSSEIVAAAMVAAHISELFRRSKALTHALSGLMRCKWDKEIHKRASSLYNLIDVHSKVVASIVDKAEPLEAYLKNTPVQKDSVTCLNWKQENTCASTTCFDTAVTSASRTEMNPRGNHKYARHSDEGSGRPSEKGIKDFLLDASDLANFLTADRLAGFYCGTQKLLRSVLAEKPELSFSVVSLLWHKLIAAPEIQPTAESTSAQQGWRQVVDALCNVVSATPAKAAAAVVLQAERELQPWIAKDDEEGQKMWKINQRIVKVLVELMRNHDRPESLVILASASDLLLRATDGMLVDGEACTLPQLELLEATARAIQPVLAWGPSGLAVVDGLSNLLKCRLPATIRCLSHPSAHVRALSTSVLRDIMNQSSIPIKVTPKLPTTEKNGMNSPSYRFFNAASIDWKADIQNCLNWEAHSLLSTTMPTQFLDTAARELGCTISLSQ

SEQ ID NO: 246 - protein, 1029 aa, Arabidopsis thaliana
MGTKVSDDLVSTVRSVVGSDYSDMDIIRALHMANHDPTAAINIIFDTPSFAKPDVATPTPSGSNGGKRVDSGLKGCTFGDSGSVGANHRVEEENESVNGGGEESVSGNEWWFVGCSELAGLSTCKGRKLKSGDELVFTFPHSKGLKPETTPGKRGFGRGRPALRGASDIVRFSTKDSGEIGRIPNEWARCLLPLVRDKKIRIEGSCKSAPEALSIMDTILLSVSVYINSSMFQKHSATSFKTASNTAEESMFHPLPNLFRLLGLIPFKKAEFTPEDFYSKKRPLSSKDGSAIPTSLLQLNKVKNMNQDANGDENEQCISDGDLDNIVGVGDSSGLKEMETPHTLLCELRPYQKQALHWMTQLEKGNCTDEAATMLHPCWEAYCLADKRELVVYLNSFTGDATIHFPSTLQMARGGILADAMGLGKTVMTISLLLAHSWKAASTGFLCPNYEGDKVISSSVDDLTSPPVKATKFLGFDKRLLEQKSVLQNGGNLIVCPMTLLGQWKTEIEMHAKPGSLSVYVHYGQSRPKDAKLLSQSDVVITTYGVLTSEFSQENSADHEGIYAVRWFRIVLDEAHTIKNSKSQISLAAAALVADRRWCLTGTPIQNNLEDLYSLLRFLRIEPWGTWAWWNKLVQKPFEEGDERGLKLVQSILKPIMLRRTKSSTDREGRPILVLPPADARVIYCELSESERDFYDALFKRSKVKFDQFVEQGKVLHNYASILELLLRLRQCCDHPFLVMSRGDTAEYSDLNKLSKRFLSGKSSGLEREGKDVPSEAFVQEVVEELRKGEQGECPICLEALEDAVLTPCAHRLCRECLLASWRNSTSGLCPVCRNTVSKQELITAPTESRFQVDVEKNWVESSKITALLEELEGLRSSGSKSILFSQWTAFLDLLQIPLSRNNFSFVRLDGTLSQQQREKVLKEFSEDGSILVLLMSLKAGGVGINLTAASNAFVMDPWWNPAVEEQAVMRIHRIGQTKEVKIRRFIVKGTVEERMEAVQARKQRMISGALTDQEVRSARIEELKMLFT

SEQ ID NO: 247 - protein, 650 aa, Arabidopsis thaliana
MGSSHIPLDPSLNPSPSLIPKLEPVTESTQNLAFQLPNTNPQALISSAVSDFNEATDFSSDYNTVAESARSAFAQRLQRHDDVAVLDSLTGAIVPVEENPEPEPNPYSTSDSSPSVATQRPRPQPRSSELVRITDVGPESERQFREHVRKTRMIYDSLRMFLMMEEAKRNGVGGRRARADGKAGKAGSMMRDCMLWMNRDKRIVGSIPGVQVGDIFFFRFELCVMGLHGHPQSGIDFLTGSLSSNGEPIATSVIVSGGYEDDDDQGDVIMYTGQGGQDRLGRQAEHQRLEGGNLAMERSMYYGIEVRVIRGLKYENEVSSRVYVYDGLFRIVDSWFDVGKSGFGVFKYRLERIEGQAEMGSSVLKFARTLKTNPLSVRPRGYINFDISNGKENVPVYLFNDIDSDQEPLYYEYLAQTSFPPGLFVQQSGNASGCDCVNGCGSGCLCEAKNSGEIAYDYNGTLIRQKPLIHECGSACQCPPSCRNRVTQKGLRNRLEVFRSLETGWGVRSLDVLHAGAFICEYAGVALTREQANILTMNGDTLVYPARFSSARWEDWGDLSQVLADFERPSYPDIPPVDFAMDVSKMRNVACYISHSTDPNVIVQFVLHDHNSLMFPRVMLFAAENIPPMTELSLDYGVVDDWNAKLAICN

SEQ ID NO: 248 - protein, 552 aa, Arabidopsis thaliana
MVVETIERSCEGSKRRHVNGGDIAVPCSGEECSNGDINVAPGVSAKRARVSREMTFEDIYGADALLNDDDDEDDDCDWEPVQAPMEFVKWCCVNCTMSNPGDMVHCCICGEHKESGILRHGYLASPFFKDTGLIEVEEKYGGSSSATSSTAVGFDERMLLHSEFEVKAQPHPERPDRLRAIAASLATAGVFPGRCLPINAREITKQELQMVHTSEHVDAVDTTSQLLYSYFTSDTYANEYSARAARLAAGLCADLATDIFTGRVKNGFALVRPPGHHAGVRHAMGFCLHNNAAVAALVAQAAGAKKVLIVDWDVHHGNGTQEIFEQNKSVLYISLHRHEGGNFYPGTGAADEVGSNGGEGYCVNVPWSCGGVGDKDYIFAFQHVVLPIASAFSPDFVIISAGFDAARGDPLGCCDVTPAGYSRMTQMLGDLCGGKMLVILEGGYNLRSISASATAVIKVLLGENPENELPIATTPSVAGLQTVLDVLNIQLEFWPSLAISYSKLLSELEARLIENKKNQMKRKVVRVPTWWKWGRKKLLYNFLSARMISRSK

SEQ ID NO: 249 - protein, 251 aa, Arabidopsis thaliana
MGRGRVELKRIENKINRQVTFAKRRNGLLKKAYELSVLCDAEVALIIFSNRGKLYEFCSSSNMLKTLDRYQKCSYGSIEVNNKPAKELENSYREYLKLKGRYENLQRQQRNLLGEDLGPLNSKELEQLERQLDGSLKQVRSIKTQYMLDQLSDLQNKEQMLLETNRALAMKLDDMIGVRSHHMGGGGGWEGGEQNVTYAHHQAQSQGLYQPLECNPTLQMGYDNPVCSEQITATTQAQAQQGNGYIPGWML

SEQ ID NO: 250 - protein, 313 aa, Arabidopsis thaliana
MVLSQKLHEAFKGTVERITGPRTISAFKEKGVLSVSEFVLAGDNLVSKCPTWSWESGDASKRKPYLPSDKQFLITRNVPCLRRAASVAEDYEAAGGEVLVDDEDNDGWLATHGKPKDKGKEEDNLPSMDALDINEKNTIQSIPTYFGGEEDDDIPDMEEFDEADNVVENDPATLQSTYLVAHEPDDDNILRTRTYDLSITYDKYYQTPRVWLTGYDESRMLLQPELVMEDVSQDHARKTVTIEDHPHLPGKHASVHPCRHGAVMKKIIDVLMSRGVEPEVDKYLFLFLKFMASVIPTIEYDYTMDFDLGSSST

SEQ ID NO: 251 - DNA, 20 bp, Sicyos angulatus
tgacagaagagagtgagcac

SEQ ID NO: 252 - DNA, 21 bp, Sicyos angulatus
tttggattgaagggagctcta

SEQ ID NO: 253 - DNA, 23 bp, Sicyos angulatus
aatttggattgaagggagctcta

SEQ ID NO: 254 - DNA, 21 bp, Cucurbita moschata
tttggattgaagggagcttta

SEQ ID NO: 255 - DNA, 20 bp, Sicyos angulatus
ttggactgaagggagctccc

SEQ ID NO: 256 - DNA, 20 bp, Sicyos angulatus
atggactgaagggagctccc

SEQ ID NO: 257 - DNA, 21 bp, Cucumis sativus
tcgataaacctctgcatccag

SEQ ID NO: 258 - DNA, 22 bp, Sicyos angulatus
tgaagctgccagcatgatctga

SEQ ID NO: 259 - DNA, 23 bp, Sicyos angulatus
aatgaagctgccagcatgatctg

SEQ ID NO: 260 - DNA, 21 bp, Sicyos angulatus
taaagctgccagcatgatctg

SEQ ID NO: 261 - DNA, 22 bp, Sicyos angulatus
tcaagctgccagcatgatctga

SEQ ID NO: 262 - DNA, 21 bp, Cucurbita moschata
taagccaaggatgaattgccg

SEQ ID NO: 263 - DNA, 21 bp, Sicyos angulatus
agaatcttgatgatgctgcag

SEQ ID NO: 264 - DNA, 20 bp, Arabidopsis thaliana
ttggactgaagggagctccc

SEQ ID NO: 265 - DNA, 20 bp, Arabidopsis thaliana
ttggactgaagggagctccc

SEQ ID NO: 266 - DNA, 20 bp, Arabidopsis thaliana
tgacagaagagagtgagcac

SEQ ID NO: 267 - DNA, 21 bp, Arabidopsis thaliana
tgaagctgccagcatgatcta

SEQ ID NO: 268 - DNA, 20 bp, Arabidopsis thaliana
ttggattgaagggagctcta

SEQ ID NO: 269 - DNA, 21 bp, Arabidopsis thaliana
cagccaaggatgacttgccga

SEQ ID NO: 270 - DNA, 21 bp, Arabidopsis thaliana
tcgataaacctctgcatccag

SEQ ID NO: 271 - DNA, 1097 bp, Cucumis sativus
gataattatttcacattgacccaccatccccaaaatctctcttcattaacttcttttcttccatttccctttcactttgacccatcattcccacctcttctctagaattttaataatcccattaaatatttaattctacatctctctagatttgcatactcttgtccccttctaaccctcttctctctctaaaacagtgcaaatttcagcttttttattttcttttcttttttaagattttgtcatgtagctttctttaaatccacaacccatatcctgatttctctccaagtaaggggagtaattttttaattgttgttgcagttttttctttgtttcctttggagttgctgcttaaagtttcttactttctttctttctgagctttgaaccaaaatcccaacaatggagaaagcccttcattatcttcttcctcttcagcttcagcttctgtttgtcttccttcttcttcgaaaacggtgtcgttccttgtctcctttgtaactctcaaaaccctgtttttgtttcttctcttcttcttacacatttgccttaatctcttggatccacatttctacttctactttcagagaaagtgaattattaatctgtgcaaatggagcaatatgaaatattagagcaaatagggaagggatcctttggttctgcccttcttgtgagacataagcatgaaaagaagaagtatgtgttgaaaaaaattcgtcttgctcgtcagaccgataggtcccgtagatctgctcaccaggagatggagctcatttctaaactacgaaatccatttattgtggagtataaagattcatgggtcgagaagggttgctatgtgtgcattattataggttattgtgaaggaggggacatggctgaagcgataaaaaaagctaacagtattcatttccccgaagagaaactgtgcaagtggttagttcaacttctgatggcactcgattacttgcacatgaatcatatccttcaccgagatgttaagtgttcaaatatatttttgactaaagatcgagatatacgccttggtgacttcggactagccaaaatgttgacgtcagacgatcttgcct

SEQ ID NO: 272 - DNA, 637 bp, Cucurbita maxima
aatccacccagaatgtttaatcgctgaatgattttgatctctttttgggactcgccttttgatttcccctaactctcagtaattgcttcattcacttgatgatttagcgttagcctttagtggagcagttcaagatctgaaaatcgcttgggggtttcgattgattctcgaattgggtttatttaatcactcgggttgaggagattttagggtatggaatctcgtatggatcattacgagataatggagcagatcgggcgtggggcttttggagccgccattcttgtttatcacaaatccgaaaagaagaagtacgtattgaagaagatcaggctcgcgcggcagaccgagcgatgtcgaagatctgctcatcaagagatggcgctgatagccagagttcaacatccttatatagttgagtttaaagaagcttgggttgagaagggctgctacgtttgtattgtgactggatactgtgaaggtggagatatggcagagctaatgaaaaagtcaaatgggttgcactttcctgaagagaaactatgcaagtggtttacacagcttttgttggcggttgagtacctgcattcaaactttgttctacatcgggaccttaaatgttccaacatctttctca

SEQ ID NO: 273 - DNA, 564 bp, Cucumis sativus
aatgctgtctcatcagctattgttactgtaccgatggttggtcgtgatggtatgatgcctgaacaatgggttcaagacgaacgggagctaaaaagacagaagaggaagcagtctaaccgagagtctgccaggagatcaagattacgcaagcaggcggagtgtgaagaactacaagcgagagtgcagacattgaacaacgaaaaccgtactctcagggacgagttacaaaggctctccgaggaatgtgaaaagctaacatcagagaatagttccatcaaggaagaattgacacgattttgtgggccagaggcattagctaacttcgaaaaaggaaacgctgcaccacctgctcaatctcgaggcggcgaaggcaaagattaagaacatcaattccacaacattcaaaagcgatggactctggactggggaagagaaagaccatattaacttaaatttatgatcttgttgtaggaatatagaaatttatttttctgactagatatacgcttgaccctgtttcaacaactgtaacattataaaaagaaaaatttctcaaaaaaaaaa

SEQ ID NO: 274 - DNA, 685 bp, Cucumis sativus
  misc_feature (1)...(685): n = A,T,C or G
aggaatggtcaggatttcaggcatattctccaatacctccacctggatatttggcaacgagcccccaagcacacccgtatatgtggggggtacagcctattatgcccccttacggaactcctccacatccatatgttgcaatgtatcctcatggtggcatatatgctcatccacctatgcctgctggatcgtatccttacagtccttttgctattgcttctccaaatggcattgctgaggcttctgggaatacaccaagcaacatggaaggggaaggtaaaccatctgagctgaaagaaaaattgccaattaaaagatcgaaaggaagtctgggaagtttaagcatgataactgggaagaacaatgagcttggtaaaccatcaggaacgtctgctaatggagtttattctaaaagtgctgaaagtgaaagtgaaggcacgagtgaaagaagtgatgctgactctgaaaacgattcacaactaaaatctggttctgggaaagattctttagaaggtggagggactcctaatggtttaatgcatggttctcagaatgaaggacatagtcttgcacatccattggtgaaccaaacgatgtccataatacctatccaagcttctggagctgttacaggtcctgctacaaatntgaatataggaatggattattggggtaccccaacaac

SEQ ID NO: 275 - DNA, 1009 bp, Cucumis sativus
ggaagacaacaatggtagtttggctcttgggatgttcatgggaaatcagataactgagaacaaaaatatggtttctaatcagaatcaaaatccagtgtttttagggacaggagttgtaaggtcttctcagccgcagcagcaacagcagccactttttcccaaaccagctaatgtgacctttgcttcttcaatgaatttagtgaacaatccccagcttaccaatggatctgggactaatttggttgtggccccaaaacctcctttgcatgatgcattaattcaaggcacgggcattggtgcgatcggcttaggcacgagaggtgtaactgttgcttcaagatctcctacaagtacaatatcatctgatgtgattacaaaatccagcattgaggcgtcttcattttcacccgttccattttcatttggccggggtcggcgaagcagtggagctctggagaaagtggtcgagaggagacaacgaagaatgataaagaacagagagtcagctgcaagatcacgggctcgtaaacaggcttacaccttggaacttgaagcagaagttgcaaaactcaaagaaatgaaccaagagttgcagaagaaacagagagagataatggagacacagaaaaatcaggttttggagaagatgaaatatcagttgggcggcaaaagattctgcttgagaagaacactgactggcccatggtagaggtgccatgatgagttgtcaaatttagttatagtgtctgaaaccagcacagaagcagtgtgtaaaaaaaggcttagactgtgtgtttctaatctgatttcaagtttagagatagattggtagctgtagataacgaagttcgagtaccggtatgtagatagcttacagaaagcagagttgagctatatgttgtataaatgatccttctgtattctaatggttgtttgcttggatctttgacctctgtatcatcaaaatggttgtttatagtttgcctaaccatttcctctaaaaaaaaaa

SEQ ID NO: 276 - DNA, 685 bp, Cucurbita maxima
gggggacgcgtgttcatccatccactttcctttcctttcctttcatcttccttttcctctgcacgaatcctttcctccaatctttcaacctttccgccatgtccatggaccttgaattccctgaaaatctccctaaaatccgccttcctttacaggttcgatcgcctcccaagccttcaaattccatcaacatcccttcctccgtctccgatcacgacagcgccgaccttgaccaccgcggctgccggacgccgacctctgccgagcacaagattccgaagatcatcagctgtcctggagcgccgaggaagccgaagcgccctcccgtaccttgcaagaggaagttgaccatggagctcaaattctttgagttcgtgaatcaagaagaagtcgataatttcttccgatccgcttacgatctcgaagcttcttccgcggcgccgccgaagaggagctgctgccggtcagcctgataatccagattgtcggtttgagccctaaattactacaccgattatagaaaatcaatttttctttaattcttttcttttctttcttccccctttcctttccctccgatagcgagtcagctcttgatgtgtattattattacacgtacataccacatggaatcgaatcgaatcgaatgcaagtcctctttgcatcatcatcggagatagataat

SEQ ID NO: 277 - DNA, 704 bp, Cucurbita maxima
agcagcctggtgaagtcacaagtctccaatatctcatcccctccaatttatctccatatgctactcactttcccatggctcagaacaacttatctacaatgcaacttaacgaactctccaatcctctatataacttccaaggttcttctcagttccaagattttaatcgacatccatgcttgagtagcaattcaacttctgatgaagcagatgagcaacagcaaagcctcattgacgagaggaagcagagaaggatggtctccaatagagagtcggcacgccggtcacgtatgcgcaaacagaagcatttggacgagctttggtctcaagtggtttggcttcggaatgagaaccatcagcttatagataagttgaaccaagtttcagactgccatgacaaggttgttcaagaaaatgctcaactcaaagagcagacttctgaactccgtcaaatgatcacagaactacaggtcaataatccttaccccaaattcagagaacttgaagaaatcccccccaacacaccatccgagagctgagtctgcaccaagataagccagggtgaggaggaaattttttccagtccctgtctccatatatggttcttctgtcttcagtcttttcctccggtcagtctgtaacatcatgcacgtaaagaagaaactgcataactactgtttgagcattttcgttgattaatgctt

SEQ ID NO: 278 - DNA, 718 bp, Cucurbita maxima
gctcttcctctctctccgccgcaatgaagcagaaatccaccatctcctccgccctccaccgccgcctatttcctatcaccctcccacgaaataatcatgaagcgtagcgcctccgagttggccctcgaagagttcctcaaaaaggccgccgtcatctctccccaagtcaccgacgccgacgccgacgccgacgacgacgttttcaatctcgaacgcgaggaagaagtcatcagaagccctaaaagaggcaaaaacttcccggactccgcctgcttcttcggcgatattgatttcagttatttcctcgtcaaaaataatcgggagataatggacgccattgttaaccgtggagctgggctgacggaggctaccatagattcccagtcttctattgtgagcagcccgacatctggtagtaatttgatgggcagagagcgcgggagaggcaacaatagcgggtcctctgaagatcagtccgacgatgaaattgaagctggctcttatgaacaaagcactgacccgcttgcttccaagaaaataagaagaatgatctcgaacagggaatccgctagaagatcgagacgaagaaaacaagctcagttgagtgaactcgagagccaggtgaaacagctgaaaggagaaaatgaaacgttgttcaaccagcttttagatgctagtcagcattaccatgatgccaatactaataatcgggtgctta

SEQ ID NO: 279 - DNA, 630 bp, Cucurbita maxima
gcggaacccaaaggtccagtccagccagctgaacaccgtgggcaaacgtcgagtggttttcaatttggcttgcaagctccggggcaagtggctctaggctctgatcgtggcacttcaacaaaagaaagtgacgctaatggtagtccacttgggatcccatccttacctgcaatgcctaagaaacaagggctacaaactgcccaaacaacaagtggatcgtccagagatgagtctgatgatgatgatcttgaaggagacattgaaaacagtgagaatatgcatccttccgatgcaagacgcgctaggaggatgttgtcaaatagagaatcagcaagacgctccagacgaagaaaacaagcacacttgaacgaccttgagacccaggttggtcaacttagggttgatcactctactttgttaaagtgtctcacggatgtaaatcaaaagtacgatgatgcagctgttgacaatagaattttgaaagctgatatcgagactttaagagcgaaggtgaaaatgtctgaagaaacagtgaaaagattgacaggagtgaacccactgcttgttgccatgtctcagagccaaatgccatttgtgagtagccaaatgccaatgcaatccaactcccaa

SEQ ID NO: 280 - DNA, 707 bp, Cucurbita maxima
  misc_feature (1)...(707): n = A,T,C or G
gatttgtgatttgtagttcttctctctgtttgtccgttccttgattcatttcccctgctccgtgtttgtctctcttgctctgatttcaaaatccatggtttactacttccttctagggttttcctgattacctcgatgattttaggttttctatgacgttctctttactgaggcgacgtattcgtatcctccactcgttttcggttgtgtttctgtactggttctacgtcttctcatgaactaatcgccttcttcgtcgctgtggaatttgattgatctcttcttgcggtagcctgagttgtagatcgggagattcatttgatttttatcagattagatactaaaacaactttttactcgagattacttggtattattttggcgggaagtaattgaaagagagaattatatggcatctattccaaggaaaagctcccccggatcaaatggaggttcgcaacctgccattcctgatgagagaaagcggaagcggatgcaatccaacagagaatcggctcggagatctcggatgaaaaagcagaagcaagtggaagacctcacgggggagctgagccgattacaaatggcgaataatcagcttctgcagagcattggtgccaaggagcaagcatttgttcangtcgacaacatgaacaatgttctcaggtctcaagctatagaactggccgatcgtctgcgatccctga

SEQ ID NO: 281 - DNA, 718 bp, Cucurbita maxima; identical to SEQ ID NO: 278

SEQ ID NO: 282 - DNA, 692 bp, Sicyos angulatus
ttcgtcggcgcaggcgcttccagtggtggcgccgccctcgtcctccgccgcagtctccatcggaggtcggaaaccgacacactctcgccttcacacacagcgtttctagggtttcgccctgccggaattggccgccgagattggatttggatttcgagaggtccagaatccacaattctcagccgttgatcttccggttcttccatctggacttccacatcagctccttgcgccatggaagcaggttggtcgtagaagttatcaagtattcaggactgtcattcggaaattgttgaattgtagtgatttcagctttggttgatggggacaggagaagagggcacgccttctaaaacttcaaaacctcccccctcatctcagcccgtacaggaaatacccccgacactttcatatcctgattggacaagctcaatgcaggcatattatggtgctggtgccactccacctccctactttgcatcttctccaactccccacccttacatgtggggaggtcagcatcctatgatgcaaccttatgggactccagtaccttatccagctatatatcctcatcctcctgggggagtttatgcccatcccaatatcactgtgactcctggctctgcaccaatcagtgcagaatacgatggaaaaccccctgatggaaaagaaagggcttcaaaaaaatc

SEQ ID NO: 283 - DNA, 698 bp, Sicyos angulatus
ggaagcgcagcgcctccgagctggctcttgaagagctcctggaaaagacgacggtggacgctttgaaagtggaacccgacgaagaagtgtcggttagtcgaagcccgaaaagaagcaaaagctttcaggattctgccgacgcctgcaacttcttccgcgatatcgatttcaatttcttcttcaccaataatccggagataatggacgcaattgttaactgtgggggtgggctggcggagggtcctttatgggcacagaatctcactcctaagctttcgagcatttcagccactatagattcccaatcttcttttgtgagcagcccaacatcaggcagcaatatgatgtccagagagcaccaaagagacaacaacagtggatcctctgaagatcagtctgatgatgaagttgaagaacctggctcttatggccaaaccactgaccctctttctttgaagaaaatgagaagaatgatctcaaatagagactctgctagacgatccagaagacgaaaacaagctcatttagccgaactcgagagccagatgaaccagctaaaagtagaaaatgaaacattgttcaaccagcttttagatgctactcaacaataccgtgatgccaatacaaacaaccgagtgcttaaatcagatgtaaacgcaatgagagcaaaggtaaaattggctgaagatacacttgct

SEQ ID NO: 284 - DNA, 698 bp, Sicyos angulatus; identical to SEQ ID NO: 283

SEQ ID NO: 285 - DNA, 1354 bp, Cucumis sativus
gaaattttccccaactcctcttctcatcatccccccccgctctattttccattccgccatttccaaactctttacttacagatctaatccttcctctctctctctctctctctctctggcaatggcggtcacctcttcccctcgcgaggagtatgtttacatggctaagcttgccgagcaagctgagcgttacgaggagatggtcgagtttatggagaaggtttccgccgctgcagatgacgaggaactcaccgttgaggagcggaatcttctttctgttgcttacaagaatgttattggagcacgtagagcttcttggaggattatttcctccattgaacagaaagaagagagccgagggaatgatgatcatgtctctgtcatccgtggttacagatccaagatcgagactgagctttctaacatttgtgatggcatccttaaacttcttgactctcgtctcatttcctctgctgcttctggtgattccaaggttttttatcttaagatgaagggcgattatcatagataccttgctgaatttaagaccggagctgaaaggaaggaagctgccgaaagtactctcactgcttataaatctgctcaggatattgcaaattctgaacttgctcctactcaccctatacgacttgggctggctttgaacttctcagtgttctattatgagattctgaattcccctgatcgcgcttgcagccttgctaaacaggctttcgatgaagcaattgctgagttggatacactgggcgaggaatcatacaaagatagcactttgatcatgcaacttcttcgtgacaacctcaccctatggacttcagacatgcaggacgatggagatgagattaaagaagcagctcccaaacgtgatgatgaatagtagtgagcatattgattctcgcaagtgcaggattcaacttctcctttacatgttttattctggaggagtgcttgtttggaaatttcgcttttctattgttatctaggtacttcttagccttttatcatcaccacactctggaaaggaaaaacaaaaaacaaaaaaaaacaaaaaaacacccttgtgtgtcttccccccaccagtctgtttttcttttttgaccatcaattccatgtccctgaactgccttatttttctcgaatataaattctacatattatcaagcatcatgtaattgatctacctttcgtcgttcgtctcttacaagagacgataacagatgatccttctcaagtaattatataaaactctctttgatgtctgattcgaatcctgttacatgtggtgttggctattttccactgccaaacaataagaagaaaagaaaaaattgta

SEQ ID NO: 286 - DNA, 1097 bp, Cucumis sativus
gagccccccgcatctctttacctttcacactttgatcctaaaaccaccgttcttcagatctattcttcatttcccttccaatggctgccgctccttctgttcgtgaggagaatgtttacatggctaagcttgccgagcaggctgagcgctacgaggagatggtcgagttcatggagaaggtttccgcttctcttgacaaggaggaactcaccgtcgaggagagaaacctcctttctgtcgcttacaagaacgtcatcggtgctcgtagggcctcctggcgtatcatttcctccatcgaacagaaggaggagagccgaggtaacgatgaccatgtctctgtgatccgtgactacagatccaaaattgagaccgaactctccaatatttgcgatggaatccttaagcttcttgattctagactcattccctccgctgcttccggagattccaaggttttttacctcaaaatgaagggcgattaccatagataccttgccgagttcaaaaccggagccgaacgcaaggaagctgctgaaagcactcttactgcttacaaagccgctcaggatattgcaaattctgagttgcctcctacacatccgatccgacttggattggcacttaacttctctgtattctattatgaaattttgaattcccctgatcgtgcctgcagtcttgcgaaacaggcatttgatgaagctatcgccgagttggatacccttggagaggaatcctacaaagatagtactttgatcatgcagcttcttcgggataatctcactctctggacatcggacatgcaggatgatggagctgatgagattaaagaagctccaccgaagcgtgaggatgaaaagcagtgagattagtggctccccaagtagggttaaaacttctcctttatatgtttttgataggagaagatgcttgctttgcttgttgttgcttatttggtactatccgagttctttctaaaaggctctcatgtcatttgttgccggattgtgatgacccgagctacaaaccttgtttactctcttcttctgattaattattatatatctataatcagtcctttgttttcttaaaaaaaa

SEQ ID NO: 287 - DNA, 852 bp, Cucumis sativus
gcgcaaatcgcttttttcttttctcttggtattatttttcttctactcgccggagttcgataatggccgccgccgtgccggaaaatctgtctcgcgagcaatacgtgtacctagcgaagcttgctgagcaggcggaaagatatgaggagatggttcagttcatgcagaaacttgttcttggttcaacacctggctcagagctatctgttgaggagcgaaatcttctctctgtggcttacaagaacgtgattgggtcacttcgagctgcttggcggattgtttcttccatcgagcaaaaggaggagagtcgtaagaatgaagagcatgttgtgcttgttaaagattatagatcaaaggttgagtctgagctttccgatgtctgcgcgagtattttgcagcttttggactcgaatcttattccatctgcctctgctagtgagtctaaggtcttctacttgaagatgaaaggggattaccataggtatttggcggagtttaaggttggagatgagaggaaagctgctgctgaggatactatgctggcttatagggctgctcaggacgtcgcagttgcggatcttgctcccactcatccgataaggctggggctggcactcaatttctctgtgttttacttcgagattctgaatcagtccgataaagcatgtagcatggccaaggaggcatttgaggaagccattgctgagctggacactctgggtgaagaatcatacaaggacagtaccctcatcatgcaactattgagggacaacctcactctctggacttcagatgcgcaggaccagttagatgagtcatagaagggcatcataagctcgacctgtcctgtgc

SEQ ID NO: 288 - DNA, 982 bp, Cucumis sativus
gcaaaagcagcagaggcaaattcgaagccacgatttcagttccagttggagaagcgatggcgaaagagagagaactactcgtttactctgctaaattggctgaacaagctgagagatatgaagagatggttgaggaaatgaagaaaattgcgaagttaaatgtggaattgactgtggaagaaagaaatctgctatctgttggctataagaatgtaataggagctagacgagcttcctggcgtattttgtcttcaattgaacagaaggaaactaccaaacataatgagaagaacgtggaacggataattggttacaggcatggggttgaagatgagctctctaaaatatgcagtgatatattgtcaatcattgaccagcatctccttccatgttcctcagctggagaatctactgtgttctaccataagatgaaaggagactactgtcggtatttggctgagtttaaatccggtgatgagcataaacaagttgcggatcagtcattaaagtcttacgaggctgcttctgcaattgctaactctgatttgtctccaactcatcctataagacttggcttggctctgaacttctctgttttctactacgagatattgaattcccctgaaagggcctgccaccttgctaagcaggcctttgatgaggctattgcagaacttgacagtctcaatgaggaatcctacaaggacattacccttattatgcagctccttagggacaatctgactctgtggacatccgatcttgcagatgaaggagagcagtccaatgccgatgaactttaggtagagagttaaatcaacatgacacttggttactggggttgaagcattgaacgatggaacatgcagtagttaatagttgttattaactgttatttgggcatgttgataggacacaatagggttcactgaaattattagctctgttttctattctgtgtttcgaagatgttgttcttcca

SEQ ID NO: 289 - DNA, 693 bp, Cucumis sativus
gcgtagctttgtttaccaccaaacatacataacattcaaaccaaaggacgattttactcagctcagttctctcttcctcccgcactaagtctctctaatggcgtccctcatccctgaaaacctaacaagggagcagtatgtttacctatccaagctttccgagcaagccgagcgctacgaggaaatggttgacttcatgcaaaagcttgtattgacctccactcctgcctccgagctcactgtcgaggagcgcaatctcctttccgttgcatacaagaacgtgatcggttctctccgagcagcttggcgcatcgtatcctccattgaacagaaggaagaaggaaggaagaacgaagatcatgtcgtcctcgtcaaagattacagatccaaggtcgaatccgaactcaccgaggtctgcgcgaatattttgaagcttttggactccaatctcataccatcttcgtcctctggtgaatctgaggtgttctacttaaagatgaagggagattaccataggtatttggctgagtttaagattggggaggagaggaagtccgccgccgaggataccatgctagcttacaaggctgctcaggatattgcagttgccgatcttgcaccaacgcatccaatcaggctgggcctagcactaaatttctctgttttttactttgagattctgaaccagtctga

SEQ ID NO: 290 - DNA, 1293 bp, Cucurbita maxima
ggttagcttaatactttgcgagtactctattatctgttgttaccgtgctgaagctactacaaatgatttctagtgctgcatttgttgatcccgagggaaacgagtgtcagcgttcttgctggcacaccaccctgtgtcctcccttttggggttcaacgtcctctctgacatatcacctccttttcctcacaagcttcccctcgaagttttaaaaatgtgtctgctagagagaggtttccacactcttgtaaagaatgtttcgttctcttctccaaccaatgtggccacacccttataaataatgtttcgttctctctctctcccaccgtccatcttgaatccaacggctcacatttaatccatctcttctctctgctcttcgtcctcaacgcaattatcgaaccactctctctctctctctctctctctctctcgcagaaggaagacaaaaactcgaacaccaaatactccaactccttcggttccctctccctcgatttcgattccgccttcttgaactcataagatctaatcgttcctctttgtttctgcaatggcggtcgcctcttcccctcgcgaggagtatgtttaccttgctaagcttgccgagcaggccgagcgctacgaggagatggtcgagtttatggaaaaggtctccgccgccgtagacaacgaggagcttaccgtcgaggagcggaaccttctctctgttgcttacaagaatgttattggagcgcgtagagcttcctggaggattatttcctccattgagcagaaggaggagagccgagggaacgatgatcatgtctcgatcatccgagattacagatccaagatcgagactgagctgtctaacatctgcgatgggatccttaatcttcttgactcgcgccttattccctccgctgcgtccggagactccaaggtgttttatctcaaaatgaagggcgattatcatagatacctggctgaattcaagaccggagccaagcggaaggaatctgccgaaagtaccctcactgcttataaatctgctcaggatattgcaaatgctgaactttctcctactcaccccatacgacttgggctggctttgaatttctcagtgttctactatgagattctgaattcccctgatcgggcatgcagccttgctaaacaggctttcgacgaggcaattgctgagttggatacattgggcgaggaatcatacaaagatagcactttgatcatgcaacttcttcgtgacaacctcaccctatggacttcggacatgcaggatgatggagatga

SEQ ID NO: 291 - DNA, 780 bp, Cucurbita maxima
gggctctcctcctctctttcttcctcttcctctttcaccctctgatcccaaatccaccagtcctcagatccaatctccatttccttgcaatggctaccgccccctctcttcgcgaggagaatgtttacatggccaagcttgcggagcaggccgagcgctacgaggagatggtcgagttcatggagaaggtttccgcttctatcgacaaggaggagctcaccgtcgaggagagaaacctcctctccgtcgcctacaagaacgtcatcggcgctcgtagggcctcttggcgtattatttcctctatcgagcagaaggaggagagccgaggtaatgatcaccatgtctctgtgatccgtgactacagatccaaaatcgagagcgaactctctaatatctgcgatggaattctcaaactcctcgattccagacttattccctccgcggcctccggagattccaaggtattttaccttaaaatgaaaggcgattaccatagatacctggctgaattcaaaaccggtgccgaacggaaggaagctgccgaaagtaccctcactgcttacaaagccgctcaggatattgcaaatgccgagttgcctcccacgcatccgatccgacttggattggctctcaacttctctgtattctactatgaaattttaaattcccctgatcgtgcctgcagtcttgcaaaacaggcgtttgatgaagccatcgctgagttggataccctcggtgaggaatcctacaaggatagtactttgattatgcaacttctcc

SEQ ID NO: 292 - DNA, 1259 bp, Cucurbita maxima
  misc_feature (1)...(1259): n = A,T,C or G
ccggggcggcgaacggtngaaaacgcaaatctctctgtctccgtctctatctctctttctctctccatcgcttcaagctcgccggagtttaataatggccgcctccgtgccggacaatctctctcgcgagcaatatgtgtatctagctaagcttgccgagcaggctgaaagatatgaggagatggttcagttcatgcagaaacttgttcttggttcaaccccaggctccgagctctctgtcgaggagcgaaatcttctctctgttgcttacaagaacgtgattggctcacttcgagctgcttggcggattgtctcttccatcgagcagaaggaggagagccgtaagaatgaagagcatgttgttcttgttaaggattatagatcaaaggttgagtccgagctttccgaggtctgtgctagtattttgaagcttttggactcgaatctaattccatcggcatgtgctagtgagtctaaggtcttctacttgaagatgaagggggattaccataggtatatggcggagtttaaggctggggatgagaggaaagctgctgctgaggatgctatgctggcttatagggatgctctggatgtcgcagttgcggatcttgcacccactcatccgataaggctgggtctggcactcaatttctctgtgttttacttcgagattctgaatcagtccgataaagcatgtagcatggccaaggaggcatttgaggaagccatcgctgagctggacactttgggtgaagaatcatacaaggacagcaccctcatcatgcagctgttgagggacaacctcacgctctggacttcagatgcgcaggaccagttagacgagtcgtagaaggtggcatgagctcgacctgtcctgtgattgtgaatggtgggggaggaggaggtgggcttcaaatgtcattttcttatgctatttaaaatgtgtgaatctggaaattaaacacattggtctgtgcctgatgtccttgtactcagactagccttgatcttcaattccgaagttccaaaattggtgggtttttcttctttcttttcatcttttcatcttttctcttctccccgatccagatgggttcttttttaccttaaaaagaatcagattgaaacaacattttaggttcattctctttaatctcaaggttgataatcatatcaggtaattcgattgaacacagccgatggatttatggcatttgattttggtcaatatatattgagaataatgcaaaaaaaaa

SEQ ID NO: 293 - DNA, 828 bp, Cucurbita maxima
gctcaacgcaattatcgctcctctctctctctctctcgcgcgcgcgcggaggagaaaagaaaagaaagaacacagaaagaagggaaagaaaaattatcgaacccccaaattctccagctccttcggtttcttctccctctattttgaatcctgctctctcagattcttcagatctaagcgttcctcctcgtttctgtaatggcggtcgcctcttcccctcgtgagaagtatgtttacatggccaagctcgccgagcaggccgagcgctacgaggagatggttgagtttatggaaaaggtctcggccgccatagaaaacgaggagcttaccgtcgaggagcggaaccttctctctgttgcttacaagaatgttattggagctcgtagagcttcctggaggatcatttcttccatcgagcagaaggaggagagccgagggaacgatgatcatgtttccgtgatcagagaatacagatctaagatcgagagcgagctctctaacatctgtgatgggatcctcaagcttcttgactcccgccttatttcctccgctgcttctggagattccaaggtgttttatctcaaaatgaagggtgattatcatagatacctggctgaattcaagaccggggccgaacggaaggaggctgccgaaagtaccctcactgcttataaatctgctcaggatatcgcaaattctgaacttgctcctactcaccccatacgacttgggctggctttgaacttttcagtgttctattacgagattctgaattcccctgatcgagcttgcagccttgccaaacaggcttttgatgaagcaattgct

SEQ ID NO: 294 - DNA, 1095 bp, Cucurbita maxima
  misc_feature (1)...(1095): n = A,T,C or G
gttcccctcctccctctcttcctctctctattctcttcttcttcccattgtctctgcttctctctgttgtttttcgcattttttgttccgttcttttccgctctctcaaaccatgtcttccgccgagaaggagagagaaactcaggtctacatggccaagcttgctgagcaggccgagcgctatgacgaaatggttgagtatatgaagaatattgcaaagcttgacctcgaactaactgtagaggagaggaaccttctttctgtggggtacaaaaatgtgattggtgcacgacgagcctcttggcgcatcatgtcttcaattgagcagaaagaggagtctaaggggaatgagaacattgtaaaattgataaagagttaccgccagaaagtcgaggaggaactttcaaagatttgtggtgatattctctctatcatagacaagcatctaatccctcattcgtctgctgcagaagccactgtcttctactacaagatgaaaggtgattactatcgttatcttgctgagttcaagacagatcaagatagaaaagaggctgctgatcagtcgttgaagggatatgaggctgcctcaggcactgcgaataccgaactcccatcgacccacccaatccgtcttggtcttgctctcaacttttctgtcttctactatgagattatgaattctcctgagagagcttgccatttggctaaacaagcttttgatgaggcaattgcagagttggataccttgagtgaggaatcatacaaggacagcactctgatcatgcagctgttgagagacaatctcaccctctggacctccgatttgcctgaagatggcggtgacgaaaacttcaaagctgaggaatccaaacctgctgaacctgaggcccagcaaggcaaatgaaagattgatgggcaaactacacaaatgatgtgtgttgagatggaagaagaagtgtgttgttcctttttaaaagagaaattttaaaaaatagctctctctctctctctaaaacacagtgtggnggattggactgcacaataaaacaattcaattcattgcggcgttttttaaaaaaccaactaaaaaat

SEQ ID NO: 295 - DNA, 1168 bp, Cucurbita maxima
ggtggtttctttgtgggtctgactcggtctctctcttttcgagccagaaccaccgaaaaacccacactgtattgcaaaccctaattctttggtctcagatcggccatggcttccagtaaagaacgcgagaacttcgtttacgtcgctaagctcgccgagcaggccgagcgttatgatgaaatggtggaagcaatgaagaatgttgcaaagcttgaggttgaattgacagttgaggaaagaaacttactttctgttggatacaagaatgtggttggtgcacggagagcctcatggaggatcttatcatcaatagagcagaaagaagaagctaaaggaaatgaagcaaatgctaaacgcatcaaggaatacagacaaaaggttgaaacagagctctctggtatttgtgatgatatcatgacagtgattgacgagcacctaattccattggcttcagctggggaatcgacagtgttctactataagatgaaaggagattattatcgttaccttgcagaatttaaatctggtaatgagaagaaagaagcagctgatcaatcgatgaaggcatatgaggctgcaaccagctcagccgaatctgaattaccccctacacatcctatccgtttgggtttggcattaaatttctcagtcttctattatgaaatcctgaattcacccgaaagggcctgccaccttgcaaagcaagcttttgatgaagccatatccgaacttgacacccttaacgaggagtcatacaaagatagcaccttgatcatgcagcttcttagggacaaccttacattatggacttctgacatcccagaggatggagatgatgcccaaaagaccaatggaacagccaagatttctggtggtgacgatgccgagtgaagcggatagcatcataagtggcagaatcatgactctggagatgatggatgtgactcgataattgctcttggtgtttagcataaggagggttccttttattatcttccctttgttcttctccttttccccccctcccccttttctgatgcccattatggtgtggttttatttttgagtatgatgtctggacacttgtttggtctataatcttgcattcgcacaagctttcccttctcagtggatggtctcgataggttgtagggggatcgacttgaat

SEQ ID NO: 296 - DNA, 1200 bp, Cucurbita maxima
ggttggtttcgccagtttcgtggggtctgactctgcctctctctttctggagccagaaccaccaaaaaaacccacactgtacagaaaaccctaattctttggtctcagatcggttatggcttcatccagagagcgcgagaacttcgtttacatcgccaagctcgccgagcaggccgagcgttatgatgaaatggtagatgcaatgaagaatgttgcaaagcttgatgtcgaattgacagtggaggaaagaaatttactctctgttgggtacaagaatgtggttggtgcaaggagagcctcatggaggattttatcatcaatagagcagaaagaagaagctaaaggaaatgaaacaaatgccaagcgcatcaaggagtacagacaaaaggttgaaacagagctctctggtatttgtactgatatcatgacagtgattgacgaacacctaattccctctgcttcagctggggaatcaacagtgttctactataagatgaaaggagattattatcgttaccttgcagaatttaagtctggtaatgagaagaaagatgcagctgatcaatcgatgaaagcatatgaggctgcaactagctcagccgaatctgaattgcctcctacacatcctatccgcttgggtttggcattaaatttctctgtcttctattatgaaatcctgaattcacctgaaagggcttgccaccttgcaaagcaagcttttgatggagccatctccgaacttgacaccctcaatgaggagtcttacaaagatagcaccttaatcatgcagcttcttagagacaacctcacattatggacttctgacatcccagaggatggagatgatgcccaaaaggtcaacggcaccgtcaaagttgctggtggcgtcgatgagtgaagcggatagtattcaaagtggcagaatcagtactactctggggatgatggatgtgactcgataatcaattgcccttagtgtttagcataaggagggttcctttttattttcttttctttttctccttccctcttctctgatgccccattattgtgtggtttattttgagtatgatgatgtctggacttatttggtctagctttcccttctcagtggatggatggttgataggttgtaggaggaatgacttgaattgttaaagtgtttatccatcctgtttacatgaaaaatgcgtttgtcta

SEQ ID NO: 297 - DNA, 645 bp, Cucurbita maxima
gctcactctctggtctcggttttctctagtttgttacattgaagatgtcgactgttgattcttcacgggaggaaaatgtttacttggccaagttggccgaacaggctgaacggtatgaggaaatggtagagttcatggagaaagttgccaaaactgtggatgtggaggagctgactgttgaggagaggaatcttctctctgttgcttacaagaatgtcattggggctcggagggcctcttggaggataatatcttccattgagcagaaggaagaaagtcgcggaaatgaggaccatgttgcaattatcaaggagtaccgtggcaaaatcgaaactgaattgagcaagatctgtgatgggatcttgagcctacttgagtctcatctcatcccatcagcctcgtctgccgagtcaaaggtgttttatctcaaaatgaaaggtgactaccacaggtatctggctgagtttaagactggagctgaaaggaaagaagcagctgagagcacattattagcttacaagtctgctcaggatattgctcttgctgaattggctcctacacatccaattaggctcggtcttgctcttaacttctccgtgttttattatgagatccttaattcgccagaccgcgcttgcaatttgg

SEQ ID NO: 298 - DNA, 653 bp, Sicyos angulatus
tccgatcccaaaaccagaaaaccagacctcagatccaaatctccgttcccctgcaatggccgccgccgccgccccctctgtccgcgaggagaacgtctacatggccaagctcgccgagcaggccgagcgctacgaggagatggtcgacttcatggagaaggtctccgcttctctcgacaaggaggagctcaccgtcgaggagcgcaacctcctctccgtcgcctacaagaacgtcatcggcgcccgcagagcttcctggcgcatcatctcctccatcgagcagaaggaggagagccgaggtaacgacgatcatgtctccgtcatccgtggctacagatccaagatcgagaaggagctctctgacatctgcgatggaatccttaagcttcttgattctagactcattccttccgctgcgtctggagattctaaggtgttttacctcaagatgaagggcgattatcatcgatatctggctgagttcaaaaccagcgctgaaaggaaggaggccgctgaaagtaccctcactgcttacaaggctgctcaggatattgcaaatgctgagttgcctcctacacatccgatccgactcggattggcccttaacttctctgtattttactatgaaattttgaattctcctgatcgtgcct

SEQ ID NO: 299 - DNA, 1707 bp, Arabidopsis thaliana
atggagcattacgaggttcttgagcaaattgggaaaggttcttttgggtcagctcttcttgtgaggcataaacatgagaagaaactttatgttttgaagaaaattcggttagctaggcagactggtagaacaagaaggtctgctcatcaagagatggaattgatctcaaagataaggaatccatttattgtggaatataaagattcttgggttgagaaaggttgctatgtgtgcattgtcataggctattgcaaaggcggtgacatggccgaagcaataaagaaagccaacggcgtagagttctctgaagagaaactctgcaagtggctggtacaactcttaatggctcttgaatacttgcacgccagtcacattctccatcgcgatgtcaagtgttcaaacatattcttgacaaaggatcaagatatacgcctaggtgatttcggacttgcgaagatcttgacatctgatgaccttgcttcttcagtggttggaacgccgagctacatgtgccctgagcttcttgctgatattccctacgggtcaaagtcggacatttggtcgctgggttgttgtatgtatgagatgacggcgctgaaaccggcattcaaagcctttgacatgcaaggtctgatcaacaggataaaccggtccatcgttgctccacttcctgcgcaatattctaccgcctttcgcagtctcgttaaaagcatgctcaggaagaatccagaactcagaccaagcgcttctgatcttctcagacagccactacttcagccctacgttcaaaaggttcttctcaagctgagcttccgggaacacgatacattgccatctgaatccgaaaggagaagtagctatcctcagcagagaaagcgtacttctggcaaaagtgtgagcttcggtccaagcaggttcggtgttgaccaagaagattctgtttcttctgttaaacccgtgcacacgtatttacaccgtcacaggccagtggatttgtctgcaaatgacactagtagagtggttgttcgtagacccgctgtttcttcagtggtttctaacagttcaaaatatgtgccagtgagatcaaaccagcctaagagtggtggtctgctgaaacctgcggtagtgactcgtagggcctccttacctatctcacagaaacctgcaaaaggaacaaaagactctctataccacccgaacatcggtatactccatcagctaaattctccagatgtgtcagtaaactcgccaagaatcgacaggatcaagttcccgttagcttcatatgaagaaatgcctttcattcccgttgttcgcaagaagaaaggatcgtccagaggatcatacagcccgcctccagagccaccactagactgctcaataacaaaagacaaattcacacttgaaccagaacgagaaaccaaaagtgatttgtctgatcaaaatgcaactgctggagcatcaagtagagcttcctcaggtgcatcaagaagacaaagattcgaccctagctcatatcgacaacgagctgaggcacttgaaggactacttgaattcagtgcaagattacttatagacgagaggtacgatgagctgaacgtgttactaaaaccatttggtccgggaaaggtatcgccaagagaaaccgcgatatggttgtctaaaagcttcaaggaaagtagtcctagtaacttggaagaagattga

SEQ ID NO: 300 - DNA, 2826 bp, Arabidopsis thaliana
atggagtcacgaatggatcagtacgagcttatggaacagatcgggagaggagcgtttggtgctgctattttagttcatcataaagctgagagaaagaagtatgttttgaagaagatcagattagctagacaaacggaacgttgccggagatctgctcatcaagagatgtctttgattgcaagagttcaacatccttatattgtggagtttaaagaagcttgggttgagaaaggttgctatgtttgtattgtcactggatactgtgaaggaggagacatggctgagttgatgaaaaagtcaaatggtgtttattttcctgaggagaaactttgcaagtggtttactcaattattattagctgttgagtatctgcattctaactatgttctacatcgggatctaaagtgttccaacattttccttacaaaagatcaagatgttcgccttggggactttggtcttgccaaaactttgaaggcggatgacctaacttcctcggttgttggaactccaaactacatgtgcccggaactgcttgctgatatcccttatggttttaagtcagatatctggtccttaggctgttgtatatatgagatggctgcgtatcgacctgctttcaaagcttttgatatggcagggcttataagcaagaaaagcactcatcaagggaatgttaaggaagaaccccgagtatcggccaaacgtatggcctccgagattttgaagcatccttatctgcagccatatgttgagcagtaccgtccaacgctttctgcggcgtctataactccagaaaagcctctcaattctcgcgagggtcggaggagtatggctgaaagtcagaatagcaatagttcaagtgaaaaagataacttctacgtgagtgacaaaaatatccgatatgtggttccaagtaatggtaataaagtcactgagaccgattcaggttttgtcgatgatgaagacatcttagaccatgtgcaacaatcagctgaaaatggtaatctccagagtgtttcagcaacaaaaccagatggccatgggattttaaagcccgtacacagtgaccagcgaccagacgttattcaaccaaggcacccaaaaactatcagaaacatcatgatggttttgaaagaagagaaagctcgagaaaatggttcacccatgagatctaatcgaagtagaccttctagtgttccgacacagaagaataatgttgaaactccatcaaagattcccaaacttggtgacattgctcatagctccaagactaacgcaagtacgcctattccaccatcaaagctggcctctgattccgcaaggactccaggatcatttccaccaaagcatcatatgccagtgattgactcttctccaaaacttaagcctagaaacgacagaatttcaccttctcctgctgctaaacatgaggctgaagaggcgatgtcagttaagcgtaggcaaagaacacctcctactttgccaagaagaacgtctttgatagcgcaccagtcgagacaactaggagcagatatttcaaatatggcagcaaaggaaaccgcgaagctacatccatctgtgccatcagagtctgaaactaattctcatcaatctcgtgttcatgcttctcctgtgagtacgacgccagagccaaagagaacctctgttggatctgccaaaggaatgcagagtgaaagcagcaactctatctcgtcgtcgttgtccatgcaggcatttgagctctgtgatgatgcttccaccccatatattgacatgacagaacatacaactcctgatgaccacagaagatcctgtcacagtgaatactcatattcatttccagatatctcctcagagatgatgatccgtagagatgaacatagcaccagtatgcggctgactgaaattcccgactctgtttccggtgtacaaaacaccattgcccatcatcagccagaaagagagcaaggaagctgtcccactgtgctcaaagatgatagtcctgcaacattacagagctacgagcctaacacatcacaacatcaacacggtgatgacaaattcacagtcaaagaattcgtctcctctgttcccggacccgcaccattgcctttgcatgttgaaccatcacaccaagtgaattcccactcggataacaaaacaagcgtaatgtctcagaactcagctcttgagaagaacaacagtcattcccatcctcatcccgtggttgatgatgtcatacatgttattcgccacagcagtttccgagtagggagcgaccagccggtcatggaaagtgttgaagtcggtgtccaaaacgtcgatatggggaaactcataaacgttgtgagagatgaaatggaagtgagaaaaggagccactccctcagaatcacccaccacaagatcgatcatctcagagcctgactcaagaaccgagcctcgtcctaaagaaccagaccccatcaccaattactcagaaacaaagagctttaactcctgctcggattcttcaccagctgagaccagaactaactcattcgtgcctgaagaggaaacaactccgactccacctgttaaagagacgttggacatcaagtcgttcagacagagagcagaagcgcttgaaggtctattggaactatctgcggatttgctggaacagagcaggctcgaagagctagccattgtgttgcagccgtttgggaagaacaaagtttcgcctcgagaaaccgctatttggttggccaagagtttgaaaggaatgatgatcgaagacatcaataataataatagcagtggcagctccaggaattgttcatga

SEQ ID NO: 301 - DNA, 387 bp, Arabidopsis thaliana
atggatcttgaattactacaagatttgtccaaattcaatttcccaacacccatcaagatccgatccaaaacctcaaaaacaaagaaggacgaaggtgatgacgacgaagatgacctccgctgcagcacacccacatcccaagaacacaagattcccgccgtcgtagactctccacctcctccgccgagaaaaccccggccaccaccgtcagcaccgtcggctacggcggctctgatgatcagatcgtgcaagaggaagcttttagtgtcgacttgtgagataatcatgaatcgggaagagattgaccgtttcttctcctccgtctacaatgagacgtcgactacggctaaacggcggagaagttacccttattgttctcgaagatga

SEQ ID NO: 302 - DNA, 948 bp, Arabidopsis thaliana
atgggaacgagcgaagacaagatgccatttaagactaccaaaccaacatcttcggctcaggaagttcctcccacaccgtatccagattggcaaaattcaatgcaggcttattatggcggaggaggtactccaaatccttttttcccatccccagttggatctcctagtcctcacccctatatgtggggtgctcaacaccatatgatgccgccttatggcaccccagttccgtacccagcaatgtatcccccgggggcagtctatgctcatcctagcatgcccatgcctcctaattctggtcctaccaacaaggagcctgcgaaggaccaagcttctggcaagaagtcaaaggggaactcgaaaaaaaaggctgaaggaggtgataaagcgctctctggttcagggaacgatggtgcctctcatagtgatgaaagtgtcacagcgggttcatctgatgaaaatgatgagaatgccaatcaacaggaacagggttcaattcgaaagccaagctttggacagatgcttgctgacgcaagttctcaaagtacgactggtgaaatccaaggttcggtgcccatgaagccggtagccccggggactaatctgaatatcgggatggacttatggtcttcccaagctggtgtaccagtgaaggatgaacgagagctcaagcggcagaagaggaaacaatctaaccgtgaatccgctaggcggtctagattgcggaagcaggccgaatgcgaacaacttcaacaaagagtagagagtttgtcgaacgagaatcaaagcctgagagatgagctacagagactctcaagcgaatgtgataagctcaagtctgagaacaactcaatccaggatgagttgcagagagtacttggagcagaggctgtagctaatctagaacagaatgctgctgggtcgaaagatggtgaaggaacaaattaa

SEQ ID NO: 303 - DNA, 1224 bp, Arabidopsis thaliana
atggctagcaatgagatggaaaaatcgagtaaagagaaggaacctaaaacacctcctccttcttctactgcccctccctcttcacaggaaccttcatcggctgtgagtgctggcatggctactccagattggtctggttttcaggcatattctcctatgccgccgcctcatggttatgtggcatctagtccccaacctcacccttatatgtggggagttcagcatatgatgcctccttatggaactccgcctcatccttatgttgcaatgtatcccccaggtggcatgtacgcacatccttcaatgcctccgggttcttatccctatagcccttatgctatgccttctccaaatggaatgactgaagtttctggcaatactacaggcggcactgatggtgatgctaaacaatctgaagtgaaggaaaaattgcccatcaaaagatcaagaggaagcttgggaagtttgaacatgattacaggaaagaacaatgaacctgggaaaaactcaggagcatcagctaatggagcttactccaaaagtggggagagtgcttctgatggttcaagtgaaggaagtgatgggaactctcaaaatagttctttattgtttttccattcagctgaagcagcatcagagaatggtggttctgccaatggtccgcaaaatggaagtgctggtacacctattctaccggtgagccagaccgtaccaatcatgccaatgacagctgcaggtgttcctggcccaccaacaaatttaaatattgggatggattactggggtgctccaacttcagctggtatccctggaatgcatgggaaagtatctacaccagttcctggagttgttgctccaggctcgcgagatggtggccattcacaaccctggttacaggacgatagagaacttaagcgacagagacggaagcagtccaatagggagtctgctcgaagatcaaggttgcgtaaacaggccgaatgtgatgagctggcccaacgcgctgaggtgttgaacgaagaaaacacaaatctcagagcagaaatcaacaagctcaaaagccaatgcgaagagcttaccaccgagaacacctctctcaaggaccaactttcattattccctccacttgaaggcataagcatggacaatgaccaccaagaaccagacaccaatcaaacaggtgccgcagagagaaaggttgattcatacaaagactcaacgtga

SEQ ID NO: 304 - DNA, 522 bp, Arabidopsis thaliana
atgcagccgcaaacagacgttttcagcctccataactacctaaactcatcgatactgcagtctccgtatccttctaatttcccgatatctacgccatttccaaccaacggtcaaaacccgtacctcctctacggattccaaagccctacaaacaatccacaatccatgagcctaagcagcaacaactcaacatcagatgaagcagaagagcagcagacgaacaacaatataatcaacgagcggaagcagagaaggatgatttcaaaccgagaatccgcaaggagatcgcgtatgaggaagcaaagacaccttgacgagctttggtcacaagtgatgtggttaaggatcgagaatcatcagttgcttgataagcttaacaatctctctgagtctcacgacaaggttcttcaagagaatgctcagcttaaagaagaaacatttgagcttaagcaagtgatcagcgatatgcaaattcaaagccctttctcttgctttagagacgatataatccccattgaataa

SEQ ID NO: 305 - DNA, 834 bp, Arabidopsis thaliana
atggataatcacacagctaaagacattggtatgaagagaagtgcttctgagctggctctacaagagtatctcactacaagccctctagacccttgtttcgacctcatgaaccgggattacacttgtgagttaagagatagtcttttgtggtctgagggattgtttccggctggaccttttcgcgatgcacagtcctcaatctgcgagaatctgtcagctgatagtccagtgtcagccaataaacctgaggtaagaggaggagttaggagaaccacaagtggatcttctcatgttaactctgatgacgaagatgccgagacagaagcagggcaatctgaaatgactaatgatcccaatgatctgaaacgtattagaaggatgaactcaaacagggaatcagcaaagaggtcgaggagaaggaagcaagagtacttggtagatcttgagactcaggttgattctttgaaaggcgataactcaacactgtacaagcagctcatagacgcaacacaacagtttcgtagcgctggaacaaataacagagttctcaaatcagatgttgaaactctgagagtcaaggtgaaactagcagaagatttggtagcgagagggtcactcactagcagcttgaatcaacttctacaaactcatctaagtccaccatcacactccatcagcagtctgcactacacgggaaatacctcgcccgccattacagtccacagtgaccaatctttgttccctggaatgacactttctggacagaactcaagccctggacttggtaatgtatccagtgaagctgttagctgcgtctcagacatctggccatga

SEQ ID NO: 306 - DNA, 1254 bp, Arabidopsis thaliana
atgaacagtatcttctccattgacgatttctccgatcctttctgggaaactcctccgattcctctcaatcccgactcttctaagcctgttacggcggatgaagttagccagagtcaaccggaatggactttcgagatgtttctcgaagagatttcttcgtcggcggtgagctctgagccacttggtaacaacaacaacgcgatcgtcggtgtttcttcggcgcaatctcttccttctgtttccggacagaatgatttcgaggatgatagtcgatttcgtgatcgcgattcgggaaatttggattgtgctgctcccatgacgacgaagacggtgattgttgattccgatgattatcgtcgtgttcttaagaacaagcttgagactgagtgcgctactgttgtttctcttcgggttgggtctgtgaagcctgaagattcgactagttctccagaaactcaacttcaaccagttcaatccagtcctcttactcaaggttctttgatgaccccaggagaacttggtgttacttcttccttaccagctgaggtgaaaaaaactggtgtatcaatgaagcaggttactagtggatcgtcgagagaatattctgatgacgaggaccttgatgaagagaatgaaaccaccggttccttgaagccagaggacgttaaaaaatctagaaggatgctgtcaaatcgtgagtcagctaggcgatctagaaggagaaagcaggagcaaacaagtgacctcgaaacacaggttaatgatctaaaaggtgagcattcatcacttcttaaacaactgagcaacatgaatcacaagtatgacgaggctgctgttggcaatagaatactaaaggctgacattgagacattaagagctaaggtgaaaatggcggaagaaaccgtgaagagagtaacaggaatgaatccgatgcttctcggaagatcaagtggacataacaacaacaacagaatgccaataactggtaacaacaggatggattcttctagcattattccagcttatcaaccacactcaaacctaaaccatatgtcaaaccaaaacatcgggatcccaaccattctacctccaagactcggaaacaatttcgctgctcctccatcccaaaccagctctcccttgcagagaattagaaatgggcaaaatcaccatgttactccaagcgccaacccgtatggctggaataccgaacctcagaacgattcagcatggccgaaaaaatgcgtggactga

SEQ ID NO: 307 - DNA, 441 bp, Arabidopsis thaliana
atggggtcgttgcaaatgcaaacaagtcctgaatccgataatgatccgaggtacgccacggtgacggatgagaggaagaggaagagaatgatctctaacagagaatctgctcggaggtcaaggatgaggaaacagaagcaacttggtgatttgatcaacgaagtcactcttctcaagaatgataacgctaaaatcactgagcaggttgatgaagcttcaaagaaatacattgaaatggagtctaagaacaatgtcttgagggcacaggcttcggagttgacggataggttgagatcattgaactctgtgcttgagatggttgaagaaattagtggtcaggctttggatattcctgagattcctgaatctatgcagaacccttggcagatgccttgtccaatgcaaccaatcagagcttctgctgatatgtttgattgctga

SEQ ID NO: 308 - DNA, 948 bp, Arabidopsis thaliana; identical to SEQ ID NO: 67

SEQ ID NO: 309 - DNA, 1365 bp, Arabidopsis thaliana; identical to SEQ ID NO: 58

SEQ ID NO: 310 - DNA, 780 bp, Arabidopsis thaliana
atggcgtctgggcgtgaagagttcgtatacatggctaagctcgcggagcaagcggagaggtacgaagagatggtagagtttatggagaaagtctccgccgccgttgatggcgatgaactcaccgtagaagagcgaaatcttctctccgtcgcttataagaatgtgattggtgctcgccgtgcctcgtggcgtatcatttcatcgatcgagcagaaggaagagagccgtggtaacgatgaccacgtcacggcgatccgtgaatataggtctaagatcgagacggaactctccggaatctgcgacggaatccttaagttgcttgactctagactcatccctgccgctgcttctggtgattccaaggtcttttaccttaagatgaagggagattatcacaggtacttggctgagtttaagactggtcaagagaggaaagacgccgccgaacatacactcgccgcttacaaatctgctcaggatattgctaatgcagagcttgctccaacacacccaattcgtcttggtcttgcattgaacttctctgtgttctattacgagatcctcaattctcctgatcgtgcctgtaacctcgccaaacaggcctttgatgaggcgattgcagagttggacactcttggtgaagagtcatacaaagacagtaccttgatcatgcagcttcttcgtgacaatctcactctctggacatctgatatgcaggatgatgctgcggatgagatcaaggaagcagcagcgccaaaaccgaccgaggaacagcagtga

SEQ ID NO: 311 - DNA, 804 bp, Arabidopsis thaliana
atggcgacaccaggagcttcctcagcaagagatgaattcgtatacatggcgaaactcgccgaacaagcagagcgttacgaagaaatggttgaattcatggagaaagtcgcgaaagctgttgacaaagacgaactcaccgtcgaagaacgtaatctcctctccgtcgcttacaaaaacgtcatcggagctcgtcgtgcttcgtggagaatcatttcatcgatcgaacaaaaggaggagtctcgcggtaacgatgaccacgtttcgttgatccgtgactacagaagcaaaatcgaaacggaactttctgatatctgtgacggaatccttaagcttctcgatacgattctcgttcccgctgctgcttctggagattcgaaggtgttttatctgaagatgaaaggtgattatcataggtacttggctgagttcaaatctggtcaagagaggaaagatgctgctgaacatactcttactgcttacaaagctgctcaggatattgctaattctgaattggctccaacgcatccgattcgtcttggtcttgcgttgaacttctctgtgttttactatgagattctcaattctccagatcgtgcttgtaatctcgctaagcaggcgtttgatgaagcaattgctgaattggatactcttggtgaagagtcatacaaggacagtactttgattatgcagcttcttcgtgataacctcactctctggacttctgatatgcaggacgatgttgctgatgacatcaaagaagcagcaccagcagcagcaaaacccgctgacgagcaacaatcctaa

SEQ ID NO: 312 - DNA, 804 bp, Arabidopsis thaliana
atggcggcaccaccagcatcatcctcggcgagggaagagttcgtgtacctcgcaaagctcgcagagcaagcggaacgttacgaagaaatggttgaattcatggaaaaagtcgctgaagccgttgacaaagacgaactcaccgtcgaagaacgtaatctcctctccgtcgcttacaaaaacgtaatcggcgctcgtcgtgcttcctggagaatcatctcttccattgaacaaaaagaagagagtcgtggtaacgatgaccatgtgaccacgatccgtgattacagaagcaagatcgaatctgagttatcgaaaatctgtgacggtattcttaagcttcttgatactagacttgttcctgcttctgctaatggagattctaaggttttttaccttaagatgaagggagattatcataggtatttggctgagtttaagactggtcaagagaggaaagatgctgctgaacatactctcaccgcttacaaagctgctcaggatattgctaatgctgaattggctccaacgcatccgattcgtcttggtttggctttgaatttctctgtgttttactatgagattcttaattctccagatcgtgcttgtaatctcgctaagcaggcgtttgatgaagccattgctgagttagatactcttggagaggagtcatacaaggatagtaccttgatcatgcagcttcttcgtgacaatcttactctctggacttctgacatgcaggacgaaagtccggaggagattaaagaagcagcagcaccaaagcctgctgaagaacagaaggagatctaa

SEQ ID NO: 313 - DNA, 747 bp, Arabidopsis thaliana
atggcgacgaccttaagcagagatcaatatgtctacatggcgaagctcgccgagcaagccgagcgttacgaagagatggttcaattcatggaacagctcgtaagtggagctacaccggccggtgagctgaccgtagaagagaggaatcttctctcggtcgcgtataagaacgtgattggatctcttcgtgcggcatggagaatcgtgtcttcgattgagcaaaaggaagagagcaggaagaacgaagaacacgtgtcgcttgttaaggattacagatctaaagttgagactgagctttcttcgatctgttctgggattctcaggttacttgattcgcatctaattccttcagctactgccagtgagtctaaggttttttacctgaagatgaaaggagattatcatcgttatttggctgagtttaaatctggtgatgagaggaaaactgctgctgaagatactatgatcgcttacaaagctgctcaggacgttgcagttgctgatctagcacctacacatccgatcaggcttggtttggctcttaacttctcagtgttttactacgagattctcaactcttcagagaaagcttgtagcatggcgaaacaggcttttgaagaagccattgctgagctggacacattgggagaggagtcatacaaggacagtactctcatcatgcagttgctaagggacaatctaaccctttggacctccgatatgcaggagcagatggatgaggcctga

SEQ ID NO: 314 - DNA, 792 bp, Arabidopsis thaliana
atgggttctggaaaagagcgtgacactttcgtctacctcgctaagctctctgagcaagctgagcgttatgaagaaatggtggaatcaatgaaaagtgttgcgaaattgaatgttgatctgacggtggaagagaggaacttactctctgtgggttacaagaacgtgattggttcaaggagagcttcgtggaggatcttctcgtcgattgaacaaaaggaagcagtgaaagggaatgatgttaatgtaaagaggatcaaagagtatatggagaaggttgagttagagctttctaacatatgcattgatattatgtctgtcttagatgagcatctcattccttcggcttccgagggtgaatctactgtcttcttcaacaagatgaaaggtgactattaccgctatcttgctgagttcaaatcagggaacgagaggaaagaggctgctgatcagtctttgaaagcctatgagattgctactactgctgctgaggctaagctccctccaacacaccctatcagattgggtttggctttgaatttctctgtcttctactacgagatcatgaacgcacctgaaagggcatgtcaccttgctaagcaggcgttcgatgaagctatctcagagcttgacactctgaacgaggaatcctacaaagatagcaccttaataatgcaactccttagggacaatctgaccttgtggacttctgacatctcagaagaaggaggagacgatgctcataagacgaatggttctgccaaacctggtgctggtggagacgatgcagagtga

SEQ ID NO: 315 - DNA, 798 bp, Arabidopsis thaliana
atgtcgtcttctcgggaagagaatgtgtacttagccaagttagctgagcaagctgaacgttatgaggaaatggttgagttcatggagaaagttgcaaagactgttgacaccgatgagcttactgtcgaagagagaaacctcttgtctgttgcttacaagaacgtcattggtgctaggagagcttcctggaggatcatatcttccattgaacagaaggaagaaagcagaggaaacgatgatcatgtttccattatcaaggactacagaggaaagatcgaaactgaactcagcaaaatctgtgatggaatactcaatcttctggattctcaccttgttcccactgcatctttggccgagtccaaagtcttttacctcaaaatgaaaggagattaccacaggtaccttgctgagtttaagactggagctgagaggaaagaagctgctgagagcactctggttgcttacaagtcagctcaggatattgcacttgctgatttagctcctactcatccgattagactgggacttgctcttaacttctctgtcttctactacgagattctcaactcacctgatcgtgcctgcagtctcgcaaaacaggcttttgatgaggccatttctgagctggatacattaggagaagaatcatacaaagacagtacgttgataatgcaacttctccgtgacaatctgaccctttggaactctgacatcaatgatgaggcgggcggtgatgagatcaaggaggcgtcaaaacatgagccggaagaggggaaaccagctgagacagggcagtga

SEQ ID NO: 316 - DNA, 807 bp, Arabidopsis thaliana
atgtcatcatcaggatccgacaaagagagagagacttttgtctatatggctaagctctccgaacaagccgagcgatacgacgagatggtggagacgatgaagaaagtggcgagggttaatagcgagctgactgtggaagagaggaatctgttgtcggttggttacaagaacgtgatcggagcaagaagagcttcgtggaggataatgtcgtccatcgagcagaaagaagagtctaaaggcaatgaatcaaacgtgaaacaaatcaagggttatcgccaaaaggtagaagatgagctcgctaacatttgccaagacattctcaccatcattgatcagcatctcatccctcacgctacctcaggggaagctaccgtcttctactacaagatgaaaggagattattaccgttacttggctgagtttaagaccgagcaagagaggaaggaagctgctgaacagtctctcaaaggctatgaggctgcaacacaagctgcaagcactgagcttccttcgacccatccaattcgtcttggccttgctcttaacttctctgttttctactatgagatcatgaactctcctgaaagagcttgccatttggctaagcaagccttcgatgaggcgattgcagagttagatactctaagtgaggagtcgtacaaggacagcactttgatcatgcagctcctgagagacaacctcaccctctggacttctgatcttcctgaagatggaggagaagacaacatcaagactgaagaatccaagcaagaacaggccaagcctgccgatgccactgagaactga

SEQ ID NO: 317 - DNA, 2390 bp, Arabidopsis thaliana
gtttgtcttccccttcattcgcaattgcttgcttggtgtgctgagaggggaggaggacgaggaggaggaaacagagcaacaagcagcccgacagacacacatctcaacaggtggatctttctcgcccgccattctatcaggtgtattattgtgcaacatatagctgaaatatggtttgggggatcttgtagtaggagcatacgatcaattttaggaaccaaggctcattttaactatgggtacaggagagatggggacaccagcgaaaacaactaaggcatccacaccacaggaacagcctccaacaagcactgccatgctttatcctgactgggctgcagcattccaggcttattataactctggaaccacaccaccacctcctcctgcgtactttcattcaagcgttgcatctagtccacagcctcatccatatatgtggggggggcagcctctaatgcctccatatggaactcttcctcccccatatgcggcaatgtatcatcatggcagcatgtatgctcatccatccatgcctccgggtgcacatccatttgctccttatgtgatgacatcgtcgttaagtacaactgaaggtgcacctgtaggcacaacttctggtgcagatgcagaaggaaagccatctgaaccaaaggaccaaactctattgaagaggtccaaaggaagcttaggcagtcttaatatgcttactggcaagattaatgaggctgacaaaggaacaggaggtggtgggaatggtgctttatctataagtggtgagagtgggagtgaaggttcaagtgaaaggagcgatgagacttctcaaaatggatcagaagccacacaaaagaagggatttgagctgaattctacaaaagctgctgaggcacaaaatacaactacaacttcatacaatgcccatggtgggagtgcatttggtgcatctggagtgcaaacagtaaatgcgactgtaaatttagccatagcagctgtcccaatctctgtagcaggcaaatctgccacagttgcagggtcaaagaccaacttaaatatgggcatggattactggagtggatcaaccactgcgacttcgaccatgcgtggaaagcgtcctgcagtgcccagaaccacagcaatggttcctgctcctcagagcatctctcttatggttccttgtgatggtgttcctacagaactttgggatgagagagaacttaaaagacaaagacgaaaacagtcaaacagggaatctgcaagacggtcaaggttgcgtaaacaggctgagtgtgaggacctagctaagcgagtcgacattctcaaagcagagaatgcttccttgaggaaagagctgaaccgattgggagaggaatgcaaaaagctctctactgagaatgcttttctccataaaaaactgtgcaaggctccagaggaagaaactagggacactagatcagaaaaggatggggaggctggaactggcgagcagcatgagcagcagaatgaggacacagacagcggagcagtggaatctatgcaaagggatggtagaagagaagaaacatcctttaatttagacggaaaaaaccaacctcttgataacaggaaccaagcagtgtctgtttctgctggttagcttgacgtaatctatccttctcatttctacggatgcctgatgccgctagtcattttctgttagacacggcttcaaatgccttggactggttgtcagtacagactaatcatgtatatgtatgtaagtgtggagacttttacccaattaatttaacattcgcagattgattgtataggaaaatatttacaggaagggaggacagcgaattacatggttcccttagtttcaatcaatatgatcaaagaggctaacaggagatagatttgaagtatataatccacaagcaagggattttaatttagattttcgtttggttgatgaacgtaatttgggtcagcggtcaactttgagctgttgttgctttgctgaattacctatactgcctgtatgaatattggcatgtgcttcaatcgcaaactttttgatgagtaagccagagaaattcacatggccactcactacacttactgacaacgaacaaactgtcaatagttattgacttagtttatagtcaagtggtggaaactgctttttaactttaggtgattggagtcatgaaattgtgaatgtaattgtatagactgacaattttcaccattggcagcctcttgtaataagcaaattgatactaaagttgctcttatttacaaacaattgagatcttttgggatgcttccctgaaagctcaagctggacattatacttctttgttgaccatattcaggaaaattatatcttacttttattaaaaaaaaaa

SEQ ID NO: 318 - DNA, 1120 bp, Arabidopsis thaliana
cctctcgtctccctctggtttccgttgtttctctctctctctctctctctctccctccctgccggaacgaacgatgtcgtcggagaaggagcgcgatgctcacgtctacctggccaagctcgccgaacaggccgagcgttacgacgaaatggtagagtgcatgaagaaggttgctaagcttgatctagatctgaccgtggaggagaggaatctcctctctgttggctacaagaatgtgattggggctaggcgagcctcgtggcgcatcatgtcctcgattgagcagaaggaagagtccaaaggcaatgagcacaatgtcaagctggtccgggactaccgacagaaggtagaggaggagctctccaagatttgcagtgacattctgtccatcatagacaagcacctgattccttcctccaatgccggagaagccaccgttttctattacaaaatgaaaggggactattaccgctaccttgctgagttcaagattgaccaggaaaggaaagaggctgcagagcaatctctgaaaggctatgaggctgcttcaagcactgcaaacacagaactcccgtccacccacccaatccgtctaggccttgcgctcaacttctctgtattctactatgagataatgaattctccagaaagggcctgccatttagccaagcaagcttttgatgaagcaattgcagagttggacacgttgagcgaggagtcctacaaggacagcaccctaattatgcaactgttgagagataacctgactctctggacctctgatttgcctgaagatggaggtgaagatggcatcaaagttgaagaacctaaacctgccgaacccgagcactgaccaatgtctcagtgatcaagaaaccgggcattaaatgactaggctgcaccatggatgcagtctttcttcttctccagcagactaagcagacaatgcggaaacccgcaagcagttattccgggcccaaagcaagtggagtagattgcttcacctccgtttcggttgcatctcttgacattttctttttgctgttcatgtttttactcgacgcttgtcatgtaaacgcagactccggatttcaatactctggttatcttaaaaaaaaaa

SEQ ID NO: 319 - DNA, 1180 bp, Arabidopsis thaliana
cttcctcctcccccttcctcaccagccagtcgtcgtctgcttgagggctagagagagagagagagagagtagagagagagtgtagagagagagagagagagaaggagatggcgtcgacgaaggagagagacggctacgtctacgtcgccaagctcgccgagcaggccgagcgctacgacgaaatggtggaggccatgaagaatgtggcgaagctcgatgtggagctgacggtggaagagaggaacctgctctccgtcggttacaagaacgtgatcggcgcgcggcgggcgtcgtggaggatcctctcttccatcgagcagaaggaggactcgaaagggaacgagcataatgtgaagaagatcaaggagtacaggcagaaggtcgaggccgagctggcgaatatctgcggggatgtgatgaaggtgatcgatgagcatttgattccttcgtgtgctggcggagaatcgaccgtgtttttctataaaatgaaaggagattactatcggtacttggcagagtttaaggctggtgatgacagaaaggaggcagctgatcagtctatgaaagcatatgagctggcttccaccaccgcagaggctgacctatccccgacacatccaatcagattgggtttggcattgaacttttctgtcttctactatgagatcatgaactctcctgaaagggcctgtcaccttgcaaagcaggcttttgacgaagcgatctcagagttggatactttgagtgaggaatcctacaaagacagcacattaattatgcagcttctaagggacaatctgacattatggacttctgacatccctgaggatggagctgaagatgctcagaagcttgataatgctgccaaagctgcaggaggtgaagatgcagagtgaggcagagtgttgcttgggagctcataaagggagtcaaatggtttgagggtggtgtttccttgtctgaaggcatattgagagacttttactttctgtttccttcacttttttcgtttcgtcgtcctcttttgcttcgacattgctactagctaattatttggtgcttgttctgtgctcccattctcacgactgctgattaaacctgataaaaattatgtcaagacagtctgttgtacgatctaagtctgtttaattgagaatgtagcgttattagaaaaaaaaaa

SEQ ID NO: 320 - DNA, 1668 bp, Arabidopsis thaliana
atggagcggtatgaagtcttggagcagatcgggaaagggtcctttggctctgctcttcttgttagacacaaacaagaacgcaagaaatacgttttgaaaaagattcgtctcgcccgccagtctgatagggctcgacgatcagctcatcaggagatggagctcatttctactgtccgcaatccatttgttgtcgagtacaaagattcatgggttgaaaagggttgctatgtgtgcattgttattggatattgccaaggcggggacatgacagataccatcaaaagagcatgtggtgttcattttcctgaggagaaattatgccaatggcttgtccaactattaatggccctcgattatcttcactccaaccatattcttcaccgcgatgtcaagtgttctaacatattcttgacaaaagagcaagacatacggcttggtgactttggactcgctaagattctaacttctgatgaccttacatcctctgttgttggaactccaagctacatgtgtcctgagcttcttgctgacataccttacggatcaaagtcagacatttggtcgttgggatgctgcatgtatgaaatggctgctcataaacctcctttcaaagcttccgatgtgcagacactgatcaccaaaatacacaagttgataatggatcctattcccgccatgtattccggctcattccgaggccttattaaaagcatgttgaggaaaaatcctgaactcaggccaagcgctaacgagctgcttaaccatcctcatcttcagccttacatcagtatggtttatatgaagctagagagccccagaagaagcacttttccactccaattttctgagagggacgctacattgaaggaaagaaggcgttcatcattcagcaacgacaggagattgaatccgagtgtctctgatacagaagcaggttctgtttcttcttcaggaaaagcatctcctacaccaatgtttaatggaagaaaagtgtcagaagtaactgtgggagtcgtcagagaagaaattgttcctcaacggcaagaggaagccaagaagcaatcaggtgcagccagaacaccaagagtggctgggacctcagctaaagcaagcacgcagcgtactgtttttaaacatgaactaatgaaggtatcgaatcctacagagaggagaaggagagtatctctgccgttggtcgtggaaaatccttacacttatgaatcagatattacagctctttgttccctaaattcaccggatgtttctgtaaacactccaagattcgacaagatcgctgaattccctgaagatatcttccaaaaccaaaacagagagacagcgtcaagaagagaagtagctaggcactctttttcttctcctccttgtccgcctcatggtgaggacaattccaacggttcgatcacaaaggacaagtgtactgtacagaaaaggtcagtttcggaggtaaaacagagaaggttcgacacgtcatcgtatcagcagcgtgcggaggctctggagggactgctggagttcagtgcaaagcttttgcagcaggaacggtacgatgagctcggggttctgcttaaaccctttggagccgagagggtgtcttcgagggagacggccatctggttgaccaagagcttcaaagaagcttccgtgtag

SEQ ID NO: 321 - DNA, 1284 bp, Arabidopsis thaliana
atggcaaacaagataagtgaaactgcttccaagatggacgattatgaggtcgtggaacagatcggacgaggcgcttttggttctgcttttcttgtaattcacaagtccgagagacgaaagtatgtggttaagaagattcgtttggctaaacaaacagagagatgcaagcttgctgcaatccaagagatgagtttgatatcaaagcttaagagtccttatattgtggagtacaaagattcttgggttgaaaaggattgtgtatgcattgtaactagttattgtgagggtggagacatgactcaaatgataaagaaatcaagaggagtattcgcgtccgaagaaaaactctgtagatggatggtgcagctactgttggctatagattacctccataacaatcgagttcttcaccgtgaccttaagtgctccaacatattcctcactaaagagaacgaggttcggttaggtgactttggcctagcaaaacttctaggcaaagatgatcttgcttcctcgatggtaggaacaccaaactacatgtgccctgaacttcttgcagatataccttatggctacaaatctgatatttggtctttaggttgttgtatgtttgaagtagctgctcatcaaccggccttcaaggctcctgacatggcagcactcatcaacaagattaaccgctcttcgctttctcctctcccagtcatgtattcctcttcattaaaaagactgatcaaaagtatgttgcgcaagaaccctgaacatagaccaactgctgcagaattgctaagacatccacacttacagccatatcttgcacaatgccaaaatctgtccccagttttcaaaccggttgtgtccaaatcagaacacaacaccaacgaaaacagaacaggtctccccccgaagaccaaatccgcaaaaacacccatcaaacacaatcaagaatcagaggaaacagagaagaaaaataaggatacgagctctagttcaaaagacaaggagagaccagcaaagagccaagagatgtcagtgattagcacattaacgttgctacgcgagtttcagaagaaaagcccgaaaagcgaggagagagcagaagcattggaatctttgttggagctttgtgcaggtttacttaggcaagagaagtttgatgagcttgaaggagtcttgaaaccttttggagatgaaacagtttcatcaagagaaaccgctatttggcttacgaagagtctcatgaatgtaaagagaaagcaaaacgatgatgaaaccaatatttaa

SEQ ID NO: 322 - DNA, 1988 bp, Arabidopsis thaliana
atggagaattacgaggttcttgagcaaattggaaaaggttcctttgggtcagctcttcttgtgagacataaacatgagaagaaactgtatgttttgaagaaaatccggcttgctcggcagactggtaggacaagaagatctgctcatcaagagatggagttgatttcaaagatacataatccattcattgtggaatataaagattcttgggttgaaaagggatgctatgtgtgcattatcataggctattgcaaaggaggagacatggcggaagcaataaagaaaaccaacggcgtacacttcactgaagagaaactctgcaaatggcttgttcagatcttattggctcttgaatacttgcatgccaatcacattctccatcgagatgtcaagtgttcgaacatatttttgacaaaggatcaagatatacgccttggcgattttggactcgctaaagtcttaacatcagatgacctcgcgtcttcagtggttggaacaccaagctacatgtgtcccgagctactagctgatataccctatgggtccaagtctgatatttggtcgctaggatgttgtatgtatgagatgacggctatgaaacctgctttcaaagcttttgacatgcaaggactaatcaacaggattaacagatcaatcgttcctccacttccggcgcaatattctgctgccttccgaggtctcgttaagagtatgctccggaaaaatccagaactcagaccaagtgctgctgagcttcttagacaaccgctgcttcaaccgtatatccagaagattcatttgaaagtgaatgatccaggaagtaatgtgttacctgcgcaatggccagaatctgaatccgccaggagaaacagttttccagaacagagaaggcgtcctgctggcaaaagccatagctttggtccaagcaggtttaggggtaacctagaagattctgtttcttccataaaaaaaactgtgcccgcatatctgaatcgtgaaaggcaagtggacttgtctacagatgcaagcggtgatggaacggttgttcgtagaacttcagaggcttctaagagttctaggtatgtaccagtgagagcttcggcctcacctgtgagacctagacagcctaggagtgaccttggtcaacttcctgtttcatcacaacttaaaaaccgaaaaccagctgctttgatacgtagagcctccatgcctagctcaagaaaacctgcaaaagaaatcaaagactctctgtacatttcgaaaaccagttttctccaccagataaattctcctgatgtgtcaatgaacgcaccaagaattgacaagattgagtttccgttagcgtcatacgaggaagagccttttgtcccggttgtgcgtgggaagaaaaagaaagcatcgtctagaggttcctacagtccacctccagagccaccactagactgctcaatcacaaaagacaaatttactcttgaaccaggccaaaacagagaaggagcgattatgaaggcggtgtatgaagaagatgcatatctggaagacaggagtgaatcatctgatcaaaatgcgacagctggagcatcaagcagggcttcgtcgggtgtaaggagacaaagatttgatcctagctcttatcagcaacgagccgaggcattggagggattgcttgaattcagtgcaaggttgcttcaagatgagaggtacgatgagctcaatgtcttattaagaccatttggtccaggcaaagtttcacccagagaaacagcgatttggttgtccaagagcttcaaggaaaccactactactaagctgggagattgagagacggatttctaattctaacctgttgtgacttgaaaattttccacctttaacagtttatcaagaaaattgtatcaaagtttaactacctaggttgtcttctttaatgagtagcggaccctctttgtctgatacattgaaattctagaaaaaacttggccggttac

SEQ ID NO: 323 - protein, 160 aa, Cucumis sativus
MEQYEILEQIGKGSFGSALLVRHKHEKKKYVLKKIRLARQTDRSRRSAHQEMELISKLRNPFIVEYKDSWVEKGCYVCIIIGYCEGGDMAEAIKKANSIHFPEEKLCKWLVQLLMALDYLHMNHILHRDVKCSNIFLTKDRDIRLGDFGLAKMLTSDDLA

SEQ ID NO: 324 - protein, 141 aa, Cucurbita maxima
MESRMDHYEIMEQIGRGAFGAAILVYHKSEKKKYVLKKIRLARQTERCRRSAHQEMALIARVQHPYIVEFKEAWVEKGCYVCIVTGYCEGGDMAELMKKSNGLHFPEEKLCKWFTQLLLAVEYLHSNFVLHRDLKCSNIFL

SEQ ID NO: 325 - protein, 106 aa, Cucumis sativus
MMPEQWVQDERELKRQKRKQSNRESARRSRLRKQAECEELQARVQTLNNENRTLRDELQRLSEECEKLTSENSSIKEELTRFCGPEALANFEKGNAAPPAQSRGGE

SEQ ID NO: 326 - protein, 227 aa, Cucumis sativus
  VARIANT (1)...(227): Xaa = Any Amino Acid
EWSGFQAYSPIPPPGYLATSPQAHPYMWGVQPIMPPYGTPPHPYVAMYPHGGIYAHPPMPAGSYPYSPFAIASPNGIAEASGNTPSNMEGEGKPSELKEKLPIKRSKGSLGSLSMITGKNNELGKPSGTSANGVYSKSAESESEGTSERSDADSENDSQLKSGSGKDSLEGGGTPNGLMHGSQNEGHSLAHPLVNQTMSIIPIQASGAVTGPATNXNIGMDYWGTPT

SEQ ID NO: 327 - protein, 235 aa, Cucumis sativus
EDNNGSLALGMFMGNQITENKNMVSNQNQNPVFLGTGVVRSSQPQQQQQPLFPKPANVTFASSMNLVNNPQLTNGSGTNLVVAPKPPLHDALIQGTGIGAIGLGTRGVTVASRSPTSTISSDVITKSSIEASSFSPVPFSFGRGRRSSGALEKVVERRQRRMIKNRESAARSRARKQAYTLELEAEVAKLKEMNQELQKKQREIMETQKNQVLEKMKYQLGGKRFCLRRTLTGPW

SEQ ID NO: 328 - protein, 124 aa, Cucurbita maxima
MSMDLEFPENLPKIRLPLQVRSPPKPSNSINIPSSVSDHDSADLDHRGCRTPTSAEHKIPKIISCPGAPRKPKRPPVPCKRKLTMELKFFEFVNQEEVDNFFRSAYDLEASSAAPPKRSCCRSA

SEQ ID NO: 329 - protein, 178 aa, Cucurbita maxima
QPGEVTSLQYLIPSNLSPYATHFPMAQNNLSTMQLNELSNPLYNFQGSSQFQDFNRHPCLSSNSTSDEADEQQQSLIDERKQRRMVSNRESARRSRMRKQKHLDELWSQVVWLRNENHQLIDKLNQVSDCHDKVVQENAQLKEQTSELRQMITELQVNNPYPKFRELEEIPPNTPSES

SEQ ID NO: 330 - protein, 207 aa, Cucurbita maxima
MKRSASELALEEFLKKAAVISPQVTDADADADDDVFNLEREEEVIRSPKRGKNFPDSACFFGDIDFSYFLVKNNREIMDAIVNRGAGLTEATIDSQSSIVSSPTSGSNLMGRERGRGNNSGSSEDQSDDEIEAGSYEQSTDPLASKKIRRMISNRESARRSRRRKQAQLSELESQVKQLKGENETLFNQLLDASQHYHDANTNNRVL

SEQ ID NO: 331 - protein, 210 aa, Cucurbita maxima
AEPKGPVQPAEHRGQTSSGFQFGLQAPGQVALGSDRGTSTKESDANGSPLGIPSLPAMPKKQGLQTAQTTSGSSRDESDDDDLEGDIENSENMHPSDARRARRMLSNRESARRSRRRKQAHLNDLETQVGQLRVDHSTLLKCLTDVNQKYDDAAVDNRILKADIETLRAKVKMSEETVKRLTGVNPLLVAMSQSQMPFVSSQMPMQSNSQ

SEQ ID NO: 332 - protein, 99 aa, Cucurbita maxima
  VARIANT (1)...(99): Xaa = Any Amino Acid
MASIPRKSSPGSNGGSQPAIPDERKRKRMQSNRESARRSRMKKQKQVEDLTGELSRLQMANNQLLQSIGAKEQAFVXVDNMNNVLRSQAIELADRLRSL

SEQ ID NO: 333 - protein, 206 aa, Cucurbita maxima
KRSASELALEEFLKKAAVISPQVTDADADADDDVFNLEREEEVIRSPKRGKNFPDSACFFGDIDFSYFLVKNNREIMDAIVNRGAGLTEATIDSQSSIVSSPTSGSNLMGRERGRGNNSGSSEDQSDDEIEAGSYEQSTDPLASKKIRRMISNRESARRSRRRKQAQLSELESQVKQLKGENETLFNQLLDASQHYHDANTNNRVL

SEQ ID NO: 334 - protein, 123 aa, Sicyos angulatus
MGTGEEGTPSKTSKPPPSSQPVQEIPPTLSYPDWTSSMQAYYGAGATPPPYFASSPTPHPYMWGGQHPMMQPYGTPVPYPAIYPHPPGGVYAHPNITVTPGSAPISAEYDGKPPDGKERASKK

SEQ ID NO: 335 - protein, 232 aa, Sicyos angulatus
KRSASELALEELLEKTTVDALKVEPDEEVSVSRSPKRSKSFQDSADACNFFRDIDFNFFFTNNPEIMDAIVNCGGGLAEGPLWAQNLTPKLSSISATIDSQSSFVSSPTSGSNMMSREHQRDNNSGSSEDQSDDEVEEPGSYGQTTDPLSLKKMRRMISNRDSARRSRRRKQAHLAELESQMNQLKVENETLFNQLLDATQQYRDANTNNRVLKSDVNAMRAKVKLAEDTLA

SEQ ID NO: 336 - protein, 166 aa, Sicyos angulatus
MDAIVNCGGGLAEGPLWAQNLTPKLSSISATIDSQSSFVSSPTSGSNMMSREHQRDNNSGSSEDQSDDEVEEPGSYGQTTDPLSLKKMRRMISNRDSARRSRRRKQAHLAELESQMNQLKVENETLFNQLLDATQQYRDANTNNRVLKSDVNAMRAKVKLAEDTLA

SEQ ID NO: 337 - protein, 258 aa, Cucumis sativus
MAVTSSPREEYVYMAKLAEQAERYEEMVEFMEKVSAAADDEELTVEERNLLSVAYKNVIGARRASWRIISSIEQKEESRGNDDHVSVIRGYRSKIETELSNICDGILKLLDSRLISSAASGDSKVFYLKMKGDYHRYLAEFKTGAERKEAAESTLTAYKSAQDIANSELAPTHPIRLGLALNFSVFYYEILNSPDRACSLAKQAFDEAIAELDTLGEESYKDSTLIMQLLRDNLTLWTSDMQDDGDEIKEAAPKRDDE

SEQ ID NO: 338 - protein, 261 aa, Cucumis sativus
MAAAPSVREENVYMAKLAEQAERYEEMVEFMEKVSASLDKEELTVEERNLLSVAYKNVIGARRASWRIISSIEQKEESRGNDDHVSVIRDYRSKIETELSNICDGILKLLDSRLIPSAASGDSKVFYLKMKGDYHRYLAEFKTGAERKEAAESTLTAYKAAQDIANSELPPTHPIRLGLALNFSVFYYEILNSPDRACSLAKQAFDEAIAELDTLGEESYKDSTLIMQLLRDNLTLWTSDMQDDGADEIKEAPPKREDEKQ

SEQ ID NO: 339 - protein, 252 aa, Cucumis sativus
MAAAVPENLSREQYVYLAKLAEQAERYEEMVQFMQKLVLGSTPGSELSVEERNLLSVAYKNVIGSLRAAWRIVSSIEQKEESRKNEEHVVLVKDYRSKVESELSDVCASILQLLDSNLIPSASASESKVFYLKMKGDYHRYLAEFKVGDERKAAAEDTMLAYRAAQDVAVADLAPTHPIRLGLALNFSVFYFEILNQSDKACSMAKEAFEEAIAELDTLGEESYKDSTLIMQLLRDNLTLWTSDAQDQLDES

SEQ ID NO: 340 - protein, 248 aa, Cucumis sativus
MAKERELLVYSAKLAEQAERYEEMVEEMKKIAKLNVELTVEERNLLSVGYKNVIGARRASWRILSSIEQKETTKHNEKNVERIIGYRHGVEDELSKICSDILSIIDQHLLPCSSAGESTVFYHKMKGDYCRYLAEFKSGDEHKQVADQSLKSYEAASAIANSDLSPTHPIRLGLALNFSVFYYEILNSPERACHLAKQAFDEAIAELDSLNEESYKDITLIMQLLRDNLTLWTSDLADEGEQSNADEL

SEQ ID NO: 341 - protein, 198 aa, Cucumis sativus
MASLIPENLTREQYVYLSKLSEQAERYEEMVDFMQKLVLTSTPASELTVEERNLLSVAYKNVIGSLRAAWRIVSSIEQKEEGRKNEDHVVLVKDYRSKVESELTEVCANILKLLDSNLIPSSSSGESEVFYLKMKGDYHRYLAEFKIGEERKSAAEDTMLAYKAAQDIAVADLAPTHPIRLGLALNFSVFYFEILNQS

SEQ ID NO: 342 - protein, 245 aa, Cucurbita maxima
MAVASSPREEYVYLAKLAEQAERYEEMVEFMEKVSAAVDNEELTVEERNLLSVAYKNVIGARRASWRIISSIEQKEESRGNDDHVSIIRDYRSKIETELSNICDGILNLLDSRLIPSAASGDSKVFYLKMKGDYHRYLAEFKTGAKRKESAESTLTAYKSAQDIANAELSPTHPIRLGLALNFSVFYYEILNSPDRACSLAKQAFDEAIAELDTLGEESYKDSTLIMQLLRDNLTLWTSDMQDDG

SEQ ID NO: 343 - protein, 230 aa, Cucurbita maxima
MATAPSLREENVYMAKLAEQAERYEEMVEFMEKVSASIDKEELTVEERNLLSVAYKNVIGARRASWRIISSIEQKEESRGNDHHVSVIRDYRSKIESELSNICDGILKLLDSRLIPSAASGDSKVFYLKMKGDYHRYLAEFKTGAERKEAAESTLTAYKAAQDIANAELPPTHPIRLGLALNFSVFYYEILNSPDRACSLAKQAFDEAIAELDTLGEESYKDSTLIMQLL

SEQ ID NO: 344 - protein, 252 aa, Cucurbita maxima
MAASVPDNLSREQYVYLAKLAEQAERYEEMVQFMQKLVLGSTPGSELSVEERNLLSVAYKNVIGSLRAAWRIVSSIEQKEESRKNEEHVVLVKDYRSKVESELSEVCASILKLLDSNLIPSACASESKVFYLKMKGDYHRYMAEFKAGDERKAAAEDAMLAYRDALDVAVADLAPTHPIRLGLALNFSVFYFEILNQSDKACSMAKEAFEEAIAELDTLGEESYKDSTLIMQLLRDNLTLWTSDAQDQLDES

SEQ ID NO: 345 - protein, 210 aa, Cucurbita maxima
MAVASSPREKYVYMAKLAEQAERYEEMVEFMEKVSAAIENEELTVEERNLLSVAYKNVIGARRASWRIISSIEQKEESRGNDDHVSVIREYRSKIESELSNICDGILKLLDSRLISSAASGDSKVFYLKMKGDYHRYLAEFKTGAERKEAAESTLTAYKSAQDIANSELAPTHPIRLGLALNFSVFYYEILNSPDRACSLAKQAFDEAIA

SEQ ID NO: 346 - protein, 264 aa, Cucurbita maxima
MSSAEKERETQVYMAKLAEQAERYDEMVEYMKNIAKLDLELTVEERNLLSVGYKNVIGARRASWRIMSSIEQKEESKGNENIVKLIKSYRQKVEEELSKICGDILSIIDKHLIPHSSAAEATVFYYKMKGDYYRYLAEFKTDQDRKEAADQSLKGYEAASGTANTELPSTHPIRLGLALNFSVFYYEIMNSPERACHLAKQAFDEAIAELDTLSEESYKDSTLIMQLLRDNLTLWTSDLPEDGGDENFKAEESKPAEPEAQQGK

SEQ ID NO: 347 - protein, 261 aa, Cucurbita maxima
MASSKERENFVYVAKLAEQAERYDEMVEAMKNVAKLEVELTVEERNLLSVGYKNVVGARRASWRILSSIEQKEEAKGNEANAKRIKEYRQKVETELSGICDDIMTVIDEHLIPLASAGESTVFYYKMKGDYYRYLAEFKSGNEKKEAADQSMKAYEAATSSAESELPPTHPIRLGLALNFSVFYYEILNSPERACHLAKQAFDEAISELDTLNEESYKDSTLIMQLLRDNLTLWTSDIPEDGDDAQKTNGTAKISGGDDAE

SEQ ID NO: 348 - protein, 260 aa, Cucurbita maxima
MASSRERENFVYIAKLAEQAERYDEMVDAMKNVAKLDVELTVEERNLLSVGYKNVVGARRASWRILSSIEQKEEAKGNETNAKRIKEYRQKVETELSGICTDIMTVIDEHLIPSASAGESTVFYYKMKGDYYRYLAEFKSGNEKKDAADQSMKAYEAATSSAESELPPTHPIRLGLALNFSVFYYEILNSPERACHLAKQAFDGAISELDTLNEESYKDSTLIMQLLRDNLTLWTSDIPEDGDDAQKVNGTVKVAGGVDE

SEQ ID NO: 349 - protein, 200 aa, Cucurbita maxima
MSTVDSSREENVYLAKLAEQAERYEEMVEFMEKVAKTVDVEELTVEERNLLSVAYKNVIGARRASWRIISSIEQKEESRGNEDHVAIIKEYRGKIETELSKICDGILSLLESHLIPSASSAESKVFYLKMKGDYHRYLAEFKTGAERKEAAESTLLAYKSAQDIALAELAPTHPIRLGLALNFSVFYYEILNSPDRACNL

SEQ ID NO: 350 - protein, 199 aa, Sicyos angulatus
MAAAAAPSVREENVYMAKLAEQAERYEEMVDFMEKVSASLDKEELTVEERNLLSVAYKNVIGARRASWRIISSIEQKEESRGNDDHVSVIRGYRSKIEKELSDICDGILKLLDSRLIPSAASGDSKVFYLKMKGDYHRYLAEFKTSAERKEAAESTLTAYKAAQDIANAELPPTHPIRLGLALNFSVFYYEILNSPDRA

SEQ ID NO: 351 - protein, 568 aa, Arabidopsis thaliana
MEHYEVLEQIGKGSFGSALLVRHKHEKKLYVLKKIRLARQTGRTRRSAHQEMELISKIRNPFIVEYKDSWVEKGCYVCIVIGYCKGGDMAEAIKKANGVEFSEEKLCKWLVQLLMALEYLHASHILHRDVKCSNIFLTKDQDIRLGDFGLAKILTSDDLASSVVGTPSYMCPELLADIPYGSKSDIWSLGCCMYEMTALKPAFKAFDMQGLINRINRSIVAPLPAQYSTAFRSLVKSMLRKNPELRPSASDLLRQPLLQPYVQKVLLKLSFREHDTLPSESERRSSYPQQRKRTSGKSVSFGPSRFGVDQEDSVSSVKPVHTYLHRHRPVDLSANDTSRVVVRRPAVSSVVSNSSKYVPVRSNQPKSGGLLKPAVVTRRASLPISQKPAKGTKDSLYHPNIGILHQLNSPDVSVNSPRIDRIKFPLASYEEMPFIPVVRKKKGSSRGSYSPPPEPPLDCSITKDKFTLEPERETKSDLSDQNATAGASSRASSGASRRQRFDPSSYRQRAEALEGLLEFSARLLIDERYDELNVLLKPFGPGKVSPRETAIWLSKSFKESSPSNLEED

SEQ ID NO: 352 - protein, 941 aa, Arabidopsis thaliana
MESRMDQYELMEQIGRGAFGAAILVHHKAERKKYVLKKIRLARQTERCRRSAHQEMSLIARVQHPYIVEFKEAWVEKGCYVCIVTGYCEGGDMAELMKKSNGVYFPEEKLCKWFTQLLLAVEYLHSNYVLHRDLKCSNIFLTKDQDVRLGDFGLAKTLKADDLTSSVVGTPNYMCPELLADIPYGFKSDIWSLGCCIYEMAAYRPAFKAFDMAGLISKKSTHQGNVKEEPRVSAKRMASEILKHPYLQPYVEQYRPTLSAASITPEKPLNSREGRRSMAESQNSNSSSEKDNFYVSDKNIRYVVPSNGNKVTETDSGFVDDEDILDHVQQSAENGNLQSVSATKPDGHGILKPVHSDQRPDVIQPRHPKTIRNIMMVLKEEKARENGSPMRSNRSRPSSVPTQKNNVETPSKIPKLGDIAHSSKTNASTPIPPSKLASDSARTPGSFPPKHHMPVIDSSPKLKPRNDRISPSPAAKHEAEEAMSVKRRQRTPPTLPRRTSLIAHQSRQLGADISNMAAKETAKLHPSVPSESETNSHQSRVHASPVSTTPEPKRTSVGSAKGMQSESSNSISSSLSMQAFELCDDASTPYIDMTEHTTPDDHRRSCHSEYSYSFPDISSEMMIRRDEHSTSMRLTEIPDSVSGVQNTIAHHQPEREQGSCPTVLKDDSPATLQSYEPNTSQHQHGDDKFTVKEFVSSVPGPAPLPLHVEPSHQVNSHSDNKTSVMSQNSALEKNNSHSHPHPVVDDVIHVIRHSSFRVGSDQPVMESVEVGVQNVDMGKLINVVRDEMEVRKGATPSESPTTRSIISEPDSRTEPRPKEPDPITNYSETKSFNSCSDSSPAETRTNSFVPEEETTPTPPVKETLDIKSFRQRAEALEGLLELSADLLEQSRLEELAIVLQPFGKNKVSPRETAIWLAKSLKGMMIEDINNNNSSGSSRNCS

SEQ ID NO: 353 - protein, 128 aa, Arabidopsis thaliana
MDLELLQDLSKFNFPTPIKIRSKTSKTKKDEGDDDEDDLRCSTPTSQEHKIPAVVDSPPPPPRKPRPPPSAPSATAALMIRSCKRKLLVSTCEIIMNREEIDRFFSSVYNETSTTAKRRRSYPYCSRR

SEQ ID NO: 354 - protein, 315 aa, Arabidopsis thaliana
MGTSEDKMPFKTTKPTSSAQEVPPTPYPDWQNSMQAYYGGGGTPNPFFPSPVGSPSPHPYMWGAQHHMMPPYGTPVPYPAMYPPGAVYAHPSMPMPPNSGPTNKEPAKDQASGKKSKGNSKKKAEGGDKALSGSGNDGASHSDESVTAGSSDENDENANQQEQGSIRKPSFGQMLADASSQSTTGEIQGSVPMKPVAPGTNLNIGMDLWSSQAGVPVKDERELKRQKRKQSNRESARRSRLRKQAECEQLQQRVESLSNENQSLRDELQRLSSECDKLKSENNSIQDELQRVLGAEAVANLEQNAAGSKDGEGTN

SEQ ID NO: 355 - protein, 407 aa, Arabidopsis thaliana
MASNEMEKSSKEKEPKTPPPSSTAPPSSQEPSSAVSAGMATPDWSGFQAYSPMPPPHGYVASSPQPHPYMWGVQHMMPPYGTPPHPYVAMYPPGGMYAHPSMPPGSYPYSPYAMPSPNGMTEVSGNTTGGTDGDAKQSEVKEKLPIKRSRGSLGSLNMITGKNNEPGKNSGASANGAYSKSGESASDGSSEGSDGNSQNSSLLFFHSAEAASENGGSANGPQNGSAGTPILPVSQTVPIMPMTAAGVPGPPTNLNIGMDYWGAPTSAGIPGMHGKVSTPVPGVVAPGSRDGGHSQPWLQDDRELKRQRRKQSNRESARRSRLRKQAECDELAQRAEVLNEENTNLRAEINKLKSQCEELTTENTSLKDQLSLFPPLEGISMDNDHQEPDTNQTGAAERKVDSYKDST

SEQ ID NO: 356 - protein, 173 aa, Arabidopsis thaliana
MQPQTDVFSLHNYLNSSILQSPYPSNFPISTPFPTNGQNPYLLYGFQSPTNNPQSMSLSSNNSTSDEAEEQQTNNNIINERKQRRMISNRESARRSRMRKQRHLDELWSQVMWLRIENHQLLDKLNNLSESHDKVLQENAQLKEETFELKQVISDMQIQSPFSCFRDDIIPIE

SEQ ID NO: 357 - protein, 277 aa, Arabidopsis thaliana
MDNHTAKDIGMKRSASELALQEYLTTSPLDPCFDLMNRDYTCELRDSLLWSEGLFPAGPFRDAQSSICENLSADSPVSANKPEVRGGVRRTTSGSSHVNSDDEDAETEAGQSEMTNDPNDLKRIRRMNSNRESAKRSRRRKQEYLVDLETQVDSLKGDNSTLYKQLIDATQQFRSAGTNNRVLKSDVETLRVKVKLAEDLVARGSLTSSLNQLLQTHLSPPSHSISSLHYTGNTSPAITVHSDQSLFPGMTLSGQNSSPGLGNVSSEAVSCVSDIWP

SEQ ID NO: 358 - protein, 417 aa, Arabidopsis thaliana
MNSIFSIDDFSDPFWETPPIPLNPDSSKPVTADEVSQSQPEWTFEMFLEEISSSAVSSEPLGNNNNAIVGVSSAQSLPSVSGQNDFEDDSRFRDRDSGNLDCAAPMTTKTVIVDSDDYRRVLKNKLETECATVVSLRVGSVKPEDSTSSPETQLQPVQSSPLTQGSLMTPGELGVTSSLPAEVKKTGVSMKQVTSGSSREYSDDEDLDEENETTGSLKPEDVKKSRRMLSNRESARRSRRRKQEQTSDLETQVNDLKGEHSSLLKQLSNMNHKYDEAAVGNRILKADIETLRAKVKMAEETVKRVTGMNPMLLGRSSGHNNNNRMPITGNNRMDSSSIIPAYQPHSNLNHMSNQNIGIPTILPPRLGNNFAAPPSQTSSPLQRIRNGQNHHVTPSANPYGWNTEPQNDSAWPKKCVD

SEQ ID NO: 359 - protein, 146 aa, Arabidopsis thaliana
MGSLQMQTSPESDNDPRYATVTDERKRKRMISNRESARRSRMRKQKQLGDLINEVTLLKNDNAKITEQVDEASKKYIEMESKNNVLRAQASELTDRLRSLNSVLEMVEEISGQALDIPEIPESMQNPWQMPCPMQPIRASADMFDC

SEQ ID NO: 360 - protein, 315 aa, Arabidopsis thaliana; identical to SEQ ID NO: 92

SEQ ID NO: 361 - protein, 454 aa, Arabidopsis thaliana; identical to SEQ ID NO: 83

SEQ ID NO: 362 - protein, 259 aa, Arabidopsis thaliana
MASGREEFVYMAKLAEQAERYEEMVEFMEKVSAAVDGDELTVEERNLLSVAYKNVIGARRASWRIISSIEQKEESRGNDDHVTAIREYRSKIETELSGICDGILKLLDSRLIPAAASGDSKVFYLKMKGDYHRYLAEFKTGQERKDAAEHTLAAYKSAQDIANAELAPTHPIRLGLALNFSVFYYEILNSPDRACNLAKQAFDEAIAELDTLGEESYKDSTLIMQLLRDNLTLWTSDMQDDAADEIKEAAAPKPTEEQQ

SEQ ID NO: 363 - protein, 267 aa, Arabidopsis thaliana
MATPGASSARDEFVYMAKLAEQAERYEEMVEFMEKVAKAVDKDELTVEERNLLSVAYKNVIGARRASWRIISSIEQKEESRGNDDHVSLIRDYRSKIETELSDICDGILKLLDTILVPAAASGDSKVFYLKMKGDYHRYLAEFKSGQERKDAAEHTLTAYKAAQDIANSELAPTHPIRLGLALNFSVFYYEILNSPDRACNLAKQAFDEAIAELDTLGEESYKDSTLIMQLLRDNLTLWTSDMQDDVADDIKEAAPAAAKPADEQQS

SEQ ID NO: 364 - protein, 267 aa, Arabidopsis thaliana
MAAPPASSSAREEFVYLAKLAEQAERYEEMVEFMEKVAEAVDKDELTVEERNLLSVAYKNVIGARRASWRIISSIEQKEESRGNDDHVTTIRDYRSKIESELSKICDGILKLLDTRLVPASANGDSKVFYLKMKGDYHRYLAEFKTGQERKDAAEHTLTAYKAAQDIANAELAPTHPIRLGLALNFSVFYYEILNSPDRACNLAKQAFDEAIAELDTLGEESYKDSTLIMQLLRDNLTLWTSDMQDESPEEIKEAAAPKPAEEQKEI

SEQ ID NO: 365 - protein, 248 aa, Arabidopsis thaliana
MATTLSRDQYVYMAKLAEQAERYEEMVQFMEQLVSGATPAGELTVEERNLLSVAYKNVIGSLRAAWRIVSSIEQKEESRKNEEHVSLVKDYRSKVETELSSICSGILRLLDSHLIPSATASESKVFYLKMKGDYHRYLAEFKSGDERKTAAEDTMIAYKAAQDVAVADLAPTHPIRLGLALNFSVFYYEILNSSEKACSMAKQAFEEAIAELDTLGEESYKDSTLIMQLLRDNLTLWTSDMQEQMDEA

SEQ ID NO: 366 - protein, 263 aa, Arabidopsis thaliana
MGSGKERDTFVYLAKLSEQAERYEEMVESMKSVAKLNVDLTVEERNLLSVGYKNVIGSRRASWRIFSSIEQKEAVKGNDVNVKRIKEYMEKVELELSNICIDIMSVLDEHLIPSASEGESTVFFNKMKGDYYRYLAEFKSGNERKEAADQSLKAYEIATTAAEAKLPPTHPIRLGLALNFSVFYYEIMNAPERACHLAKQAFDEAISELDTLNEESYKDSTLIMQLLRDNLTLWTSDISEEGGDDAHKTNGSAKPGAGGDDAE

SEQ ID NO: 367 - protein, 265 aa, Arabidopsis thaliana
MSSSREENVYLAKLAEQAERYEEMVEFMEKVAKTVDTDELTVEERNLLSVAYKNVIGARRASWRIISSIEQKEESRGNDDHVSIIKDYRGKIETELSKICDGILNLLDSHLVPTASLAESKVFYLKMKGDYHRYLAEFKTGAERKEAAESTLVAYKSAQDIALADLAPTHPIRLGLALNFSVFYYEILNSPDRACSLAKQAFDEAISELDTLGEESYKDSTLIMQLLRDNLTLWNSDINDEAGGDEIKEASKHEPEEGKPAETGQ

SEQ ID NO: 368 - protein, 268 aa, Arabidopsis thaliana
MSSSGSDKERETFVYMAKLSEQAERYDEMVETMKKVARVNSELTVEERNLLSVGYKNVIGARRASWRIMSSIEQKEESKGNESNVKQIKGYRQKVEDELANICQDILTIIDQHLIPHATSGEATVFYYKMKGDYYRYLAEFKTEQERKEAAEQSLKGYEAATQAASTELPSTHPIRLGLALNFSVFYYEIMNSPERACHLAKQAFDEAIAELDTLSEESYKDSTLIMQLLRDNLTLWTSDLPEDGGEDNIKTEESKQEQAKPADATEN

SEQ ID NO: 369 - protein, 465 aa, Arabidopsis thaliana
MGTGEMGTPAKTTKASTPQEQPPTSTAMLYPDWAAAFQAYYNSGTTPPPPPAYFHSSVASSPQPHPYMWGGQPLMPPYGTLPPPYAAMYHHGSMYAHPSMPPGAHPFAPYVMTSSLSTTEGAPVGTTSGADAEGKPSEPKDQTLLKRSKGSLGSLNMLTGKINEADKGTGGGGNGALSISGESGSEGSSERSDETSQNGSEATQKKGFELNSTKAAEAQNTTTTSYNAHGGSAFGASGVQTVNATVNLAIAAVPISVAGKSATVAGSKTNLNMGMDYWSGSTTATSTMRGKRPAVPRTTAMVPAPQSISLMVPCDGVPTELWDERELKRQRRKQSNRESARRSRLRKQAECEDLAKRVDILKAENASLRKELNRLGEECKKLSTENAFLHKKLCKAPEEETRDTRSEKDGEAGTGEQHEQQNEDTDSGAVESMQRDGRREETSFNLDGKNQPLDNRNQAVSVSAG

SEQ ID NO: 370 - protein, 259 aa, Arabidopsis thaliana
MSSEKERDAHVYLAKLAEQAERYDEMVECMKKVAKLDLDLTVEERNLLSVGYKNVIGARRASWRIMSSIEQKEESKGNEHNVKLVRDYRQKVEEELSKICSDILSIIDKHLIPSSNAGEATVFYYKMKGDYYRYLAEFKIDQERKEAAEQSLKGYEAASSTANTELPSTHPIRLGLALNFSVFYYEIMNSPERACHLAKQAFDEAIAELDTLSEESYKDSTLIMQLLRDNLTLWTSDLPEDGGEDGIKVEEPKPAEPEH

SEQ ID NO: 371 - protein, 262 aa, Arabidopsis thaliana
MASTKERDGYVYVAKLAEQAERYDEMVEAMKNVAKLDVELTVEERNLLSVGYKNVIGARRASWRILSSIEQKEDSKGNEHNVKKIKEYRQKVEAELANICGDVMKVIDEHLIPSCAGGESTVFFYKMKGDYYRYLAEFKAGDDRKEAADQSMKAYELASTTAEADLSPTHPIRLGLALNFSVFYYEIMNSPERACHLAKQAFDEAISELDTLSEESYKDSTLIMQLLRDNLTLWTSDIPEDGAEDAQKLDNAAKAAGGEDAE

SEQ ID NO: 372 - protein, 555 aa, Arabidopsis thaliana
MERYEVLEQIGKGSFGSALLVRHKQERKKYVLKKIRLARQSDRARRSAHQEMELISTVRNPFVVEYKDSWVEKGCYVCIVIGYCQGGDMTDTIKRACGVHFPEEKLCQWLVQLLMALDYLHSNHILHRDVKCSNIFLTKEQDIRLGDFGLAKILTSDDLTSSVVGTPSYMCPELLADIPYGSKSDIWSLGCCMYEMAAHKPPFKASDVQTLITKIHKLIMDPIPAMYSGSFRGLIKSMLRKNPELRPSANELLNHPHLQPYISMVYMKLESPRRSTFPLQFSERDATLKERRRSSFSNDRRLNPSVSDTEAGSVSSSGKASPTPMFNGRKVSEVTVGVVREEIVPQRQEEAKKQSGAARTPRVAGTSAKASTQRTVFKHELMKVSNPTERRRRVSLPLVVENPYTYESDITALCSLNSPDVSVNTPRFDKIAEFPEDIFQNQNRETASRREVARHSFSSPPCPPHGEDNSNGSITKDKCTVQKRSVSEVKQRRFDTSSYQQRAEALEGLLEFSAKLLQQERYDELGVLLKPFGAERVSSRETAIWLTKSFKEASV

SEQ ID NO: 373 - protein, 427 aa, Arabidopsis thaliana
MANKISETASKMDDYEVVEQIGRGAFGSAFLVIHKSERRKYVVKKIRLAKQTERCKLAAIQEMSLISKLKSPYIVEYKDSWVEKDCVCIVTSYCEGGDMTQMIKKSRGVFASEEKLCRWMVQLLLAIDYLHNNRVLHRDLKCSNIFLTKENEVRLGDFGLAKLLGKDDLASSMVGTPNYMCPELLADIPYGYKSDIWSLGCCMFEVAAHQPAFKAPDMAALINKINRSSLSPLPVMYSSSLKRLIKSMLRKNPEHRPTAAELLRHPHLQPYLAQCQNLSPVFKPVVSKSEHNTNENRTGLPPKTKSAKTPIKHNQESEETEKKNKDTSSSSKDKERPAKSQEMSVISTLTLLREFQKKSPKSEERAEALESLLELCAGLLRQEKFDELEGVLKPFGDETVSSRETAIWLTKSLMNVKRKQNDDETNI

SEQ ID NO: 374 - protein, 606 aa, Arabidopsis thaliana [sequence omitted]

SEQ ID NO: 375 - DNA, 1468 bp, Cucurbita spp
gtttctctatctctctctctctctaaaaaacccactcacacaatcctccatcaatcccatatacataaacttttcgtttcctttctctgtttttccccctttttgtttttgtgtttttttgaaggaaattggatggtgggttgttgatttgatccaaattgctgctctccaactgctgtcttgtgttggaaatggggatttgggtagtgggtttttatgggatgagttcttcgccggcgatggggcggtgatttcaggaccatgttcctctgcgatggagtacgattctggaattccgatgtctgtgacggagggacactcctctgcccttgcaccatccttgcgcgaagatgcactttggcaaatgaacttgggatcaggtgaaataatgggatctggatcttatccagtgcgacctggagagccagactgttcttattacatcagaactggcctatgtagatttggggctacatgtagatttaatcatccacctaatagagagctggctattgccactgcaagaatgaagggggagttcccggaaagaattggacaaccagaatgtcagtactacctgaagacaggaacttgcaagtttggggccacgtgcaagtttcatcatcctagagacaaggccgggattgctggaagagttgccttaaatattttaggctatccacttcgcccgagtgaaactgaatgtgcttattatttaagaactggacaatgcaagtttggaaatacatgtaaattccaccatcctcaaccaactaatatgatggtctcattgcgtggttctcctatttatccaaccgtacaatcaccaactcctggtcagcaatcgtatccaggaggaagtacaaattggtctagggcttcatttattcccagtccacgatggcaaggtccttccagttatgcatctttaatattacctcagggagttctttctgttccaggttggaatgcattcaatgatcagctaggatcggtttcgtcttcagaaagtccacaacaaacgagggagaatgtatttcctgagaggcctggccagcctgaatgtcagttttacatgaagactggagattgcaagtttggtgctgtttgtcgatttcaccatcccagagaaagagtacttcctgctccagattgtgtcttgagtccaataggcctgccactacgtccgggagaacctttgtgcatcttttattctcgttatgggatctgtaagtttggtccaagctgcaagtttgatcaccctatgggaatcttcacatacaatctctcagcagcatcatcagccaatgccccggttcagcatttgtttgggacgtcttcgggaacaactgcactgaacctatcatctgaggggctagttgaagcaggatctgcaaagccaaggcggctatcaatctcggagagtcgagaaatgccatctgatgatgaaaatgacgctgagggctga

SEQ ID NO: 376 - DNA, 1194 bp, Cucurbita spp
atggagtacgattctggaattccgatgtctgtgacggagggacactcctctgcccttgcaccatccttgcgcgaagatgcactttggcaaatgaacttgggatcaggtgaaataatgggatctggatcttatccagtgcgacctggagagccagactgttcttattacatcagaactggcctatgtagatttggggctacatgtagatttaatcatccacctaatagagagctggctattgccactgcaagaatgaagggggagttcccggaaagaattggacaaccagaatgtcagtactacctgaagacaggaacttgcaagtttggggccacgtgcaagtttcatcatcctagagacaaggccgggattgctggaagagttgccttaaatattttaggctatccacttcgcccgagtgaaactgaatgtgcttattatttaagaactggacaatgcaagtttggaaatacatgtaaattccaccatcctcaaccaactaatatgatggtctcattgcgtggttctcctatttatccaaccgtacaatcaccaactcctggtcagcaatcgtatccaggaggaagtacaaattggtctagggcttcatttattcccagtccacgatggcaaggtccttccagttatgcatctttaatattacctcagggagttctttctgttccaggttggaatgcattcaatgatcagctaggatcggtttcgtcttcagaaagtccacaacaaacgagggagaatgtatttcctgagaggcctggccagcctgaatgtcagttttacatgaagactggagattgcaagtttggtgctgtttgtcgatttcaccatcccagagaaagagtacttcctgctccagattgtgtcttgagtccaataggcctgccactacgtccgggagaacctttgtgcatcttttattctcgttatgggatctgtaagtttggtccaagctgcaagtttgatcaccctatgggaatcttcacatacaatctctcagcagcatcatcagccaatgccccggttcagcatttgtttgggacgtcttcgggaacaactgcactgaacctatcatctgaggggctagttgaagcaggatctgcaaagccaaggcggctatcaatctcggagagtcgagaaatgccatctgatgatgaaaatgacgctgagggctga

SEQ ID NO: 377 - DNA, 1014 bp, Cucurbita maxima
ccgcgaatccacgctctgactcccacacgaccaccgccggtgacggagaatcggaaccgccgcggagaggcttgggaaacggcgagccagagatcgacttcaatggcgagcgaaggcgcttccagtgagaattttacttccataagtagagagttcaatgctctggtgatcgccggcgcggagatcggcgacggttatcgccaggaccggccgattaacgaagctccgaataacttgagcaggattggagaggaagatcaggctacgcctgaggaggagacgaatccgttggcgatcgtaccggacggtcatccgtttgatgatcaattaacgccgtcgtcaatcacgagacaggagaacagtagcggcggaggagcagcagcgacaagagagatttcgttgcagatggtgaagaaggaggaggtggagacgaagattagcgcatggcggaacgcgaagattgcaaagattaacaatcggttcaagagagaagatgcagtgatcagtggatgggagagggagcaggttcagaaggcaacttcgtggatgaagaaggttcagaggaggttggaagagaggagagcaaaagcgcttgaaaagatggagaatgaagtggcgaaggcgcgcagaaaagcagaggaaagaagagcatcagctgaagccaagaggggaacaaaagttgcgaaggtcattgaaatatcaaacttgatgagagcagttggaaggccaccagccaagcgctccttcttctgaattcctctctcttttgatgacagcagttggaattcgtctctctttgtaactaattaaggagatggataatcaaaaccctccataaacagatttacattttttcttttacttgagagaacaaaggaaagctatattatgcatcgttctctaccaagatcaaatcttggtttctggttggttttagtttaagaacttgtaagtaagaaatgggcaattagtctatgtgtttatacgagtttgtctttatcagacttcttgcaa

SEQ ID NO: 378 - DNA, 651 bp, Cucurbita maxima
atggcgagcgaaggcgcttccagtgagaattttacttccataagtagagagttcaatgctctggtgatcgccggcgcggagatcggcgacggttatcgccaggaccggccgattaacgaagctccgaataacttgagcaggattggagaggaagatcaggctacgcctgaggaggagacgaatccgttggcgatcgtaccggacggtcatccgtttgatgatcaattaacgccgtcgtcaatcacgagacaggagaacagtagcggcggaggagcagcagcgacaagagagatttcgttgcagatggtgaagaaggaggaggtggagacgaagattagcgcatggcggaacgcgaagattgcaaagattaacaatcggttcaagagagaagatgcagtgatcagtggatgggagagggagcaggttcagaaggcaacttcgtggatgaagaaggttcagaggaggttggaagagaggagagcaaaagcgcttgaaaagatggagaatgaagtggcgaaggcgcgcagaaaagcagaggaaagaagagcatcagctgaagccaagaggggaacaaaagttgcgaaggtcattgaaatatcaaacttgatgagagcagttggaaggccaccagccaagcgctccttcttctga

SEQ ID NO: 379 - protein, 397 aa, Cucurbita spp
MEYDSGIPMSVTEGHSSALAPSLREDALWQMNLGSGEIMGSGSYPVRPGEPDCSYYIRTGLCRFGATCRFNHPPNRELAIATARMKGEFPERIGQPECQYYLKTGTCKFGATCKFHHPRDKAGIAGRVALNILGYPLRPSETECAYYLRTGQCKFGNTCKFHHPQPTNMMVSLRGSPIYPTVQSPTPGQQSYPGGSTNWSRASFIPSPRWQGPSSYASLILPQGVLSVPGWNAFNDQLGSVSSSESPQQTRENVFPERPGQPECQFYMKTGDCKFGAVCRFHHPRERVLPAPDCVLSPIGLPLRPGEPLCIFYSRYGICKFGPSCKFDHPMGIFTYNLSAASSANAPVQHLFGTSSGTTALNLSSEGLVEAGSAKPRRLSISESREMPSDDENDAEG

SEQ ID NO: 380 - protein, 216 aa, Cucurbita maxima
MASEGASSENFTSISREFNALVIAGAEIGDGYRQDRPINEAPNNLSRIGEEDQATPEEETNPLAIVPDGHPFDDQLTPSSITRQENSSGGGAAATREISLQMVKKEEVETKISAWRNAKIAKINNRFKREDAVISGWEREQVQKATSWMKKVQRRLEERRAKALEKMENEVAKARRKAEERRASAEAKRGTKVAKVIEISNLMRAVGRPPAKRSFF

SEQ ID NO: 381 - DNA, 20 bp, Arabidopsis thaliana
tcccaaatgtagacaaagca

SEQ ID NO: 382 - DNA, 110 bp, Arabidopsis thaliana
gagtaacacgtcatctctgtgcttctttgtctacaattttggaaaaagtgatgacgccattgctctttcccaaatgtagacaaagcaataccgtgatgatgtcgtggaga

SEQ ID NO: 383 - DNA, 25 bp, Artificial Sequence
  Made in the lab
gagtaacacgtcatctctgtgcttc

SEQ ID NO: 384 - DNA, 25 bp, Artificial Sequence
  Made in the lab
tctccacgacatcatcacggtattg

SEQ ID NO: 385 - DNA, 21 bp, Arabidopsis thaliana
tgattgagccgcgccaatatc

SEQ ID NO: 386 - DNA, 175 bp, Arabidopsis thaliana
gatatccgcactttaagcatgagagagtccctttgatattggcctggttcactcagatcttacctgaccacacacgtagatatacattattctctctagattatctgattgagccgcgccaatatctcagtactctctcgtctctattttggactttgtggtcttgtagatcgat

SEQ ID NO: 387 - DNA, 27 bp, Artificial Sequence
  Made in the lab
gatatccgcactttaagcatgagagag

SEQ ID NO: 388 - DNA, 26 bp, Artificial Sequence
  Made in the lab
atcgatctacaagaccacaaagtcca

SEQ ID NO: 389 - DNA, 168 bp, Arabidopsis thaliana
cttgatctgctacggtgaagtctatggtgcaccggcatctgatgaagctgccagcatgatctaattagctttctttatcctttgttgtgtttcatgacgatggttaagagatcagtctcgattagatcatgttcgcagtttcacccgttgactgtcgcacccttctat

SEQ ID NO: 390 - DNA, 28 bp, Artificial Sequence
  Made in the lab
cttgatctgctacggtgaagtctatggt

SEQ ID NO: 391 - DNA, 25 bp, Artificial Sequence
  Made in the lab
atagaagggtgcgacagtcaacggg

SEQ ID NO: 392 - DNA, 340 bp, Arabidopsis thaliana
tgagttagtcaaagcagatccacacgattatatagaaaaacaaaggaagaagaagaggaagagctccttgaagttcaatggagggtttagcagggtgaagtaaagctgctaagctatggatcccataagccttatcaaattcaatataattgatgataaggttttttttatggatgccatatctcaggagctttcacttacccctttaatggcttcactcttctttggattgaagggagctcttcatctctccatccctatctctctctctctctatctttagttcttttaagaatgacttttcattttttgtgttgtctgttgcaggtgtataaacatg

SEQ ID NO: 393 - DNA, 26 bp, Artificial Sequence
  Made in the lab
tgagttagtcaaagcagatccacacg

SEQ ID NO: 394 - DNA, 27 bp, Artificial Sequence
  Made in the lab
catgtttatacacctgcaacagacaac

SEQ ID NO: 395 - DNA, 21 bp, Arabidopsis thaliana
tgattgagccgcgccaatatc

SEQ ID NO: 396 - DNA, 1865 bp, Arabidopsis thaliana
gctcaagtgtgcaatatacatcacaatacctttgtccttgtttcaggtctacttttacatcatagaacttgctcctatagataatacaatgcatggtattgacgtaagaactcttagcttttcatattagtagcttataatgttccttaaatgcgacattgatattaagctactactcaataactcaatggtaacgaatcataagtctgaactattcgaaaacagtaatcctgaaaagaaagaatgaagcgtgttgataagtaatgatatgatttgatattgcaagtcaagaaaatataattgggtagagaaagaaagagagataatgtgtgttctgcataaaatttatggcaatggtggaccggagaggttaatgtagtaagaaagcatgagagaagtaaataggggttgcaaaagtttttgccatcccaccagtcctaaccagacaaaaaagaaaggtgttggttttaaacaagctctggtgttacaatgtgacattaaaacacgaatcttttctcttgagaatcatcaatagagagagagagtgagtggtcatattagggttcataacttgcttgaggttttgtaaaaagcagagaaagagagagagaggggcctagaaagaaagaaagaaaagcagtaagagactattaaatgttgcaggcaggtccagccagtgtcccctctcttctgcgagattccctcaaaatttattacaaagcatcttcatcgatgttcttttaattcttcctcaaaatcttttctctttttttggttatatatatttgaattttgatttatgaacctcctcaagaaggaaagacagaggaggagacaaagaagtataggttcacattgcatagccagtttagttttgaaggatggatatatgaaaaaaatatgaagagagagaagagagaagaagaggaggattaaagagggtgaggccagcttttgtgctttggtagtagatgaggtttaaatgctccataccttccatttccttctctcttaccctaatttaattcttcctctcctttataactccccacagacattctcacttctcctcctcacacttcacatcaacacttctttcttgttttttcattttacaatgtttcctttgatatccgcactttaagcatgagagagtccctttgatattggcctggttcactcagatcttacctgaccacacacgtagatatacattattctctctagattatctgattgagccgcgccaatatctcagtactctctcgtctctattttggactttgtggtcttgtagatcgatttgtatgtgtgtgttgaaatggagacaagtacttgtaacttctttgttgttatattgtttacctataggctgatgtcataaactcttttgatcttgtttctaacttccagattcttgaaaaatcaagtcgtgtgtgtgtctccatggaagccttttccatttcttcttttccaaggtatccccttaatcagcttccttgccaagtataaatctgttgtagggttttgcttcaaataatctatatggatccttttagaatgcatattgtgttgataccaattttgagacagaatgtgtcagcgaaactgatcttgtttattagtacaaatgcaggatgttagagagttagctaataacatatacaacaaaatcacaaaaccggtgaagcaatgtaaaatgtcacaatcacaagatgtttttttcaaaaacaggggaaaaagcagagttaatgagagagaagctgacgagcacgaaccctaacctgcaagcgagcaagagcatgcatacaatgtaaagcaattcgtgcttgtctcctcacaagcactcctctagccaccgcctg

SEQ ID NO: 397 - DNA, 30 bp, Artificial Sequence
  Made in the lab
gctcaagtgtgcaatatacatcacaatacc

SEQ ID NO: 398 - DNA, 22 bp, Artificial Sequence
  Made in the lab
caggcggtggctagaggagtgc

SEQ ID NO: 399 - DNA, 22 bp, Arabidopsis thaliana
atcggctggcggactggtcaac

SEQ ID NO: 400 - DNA, 2934 bp, Arabidopsis thaliana
cacatcaacaaccactaccacaataccaaaaaccctgctaattctaataagcaatctttgttactcgagaaagtgatatatacatatatacaatgaaaaccactctacgtaattaattttttgccataacaatataaaaagattgttgcatacgtttctatcagtttttatttcacatttaatcatatatgaagaacggtaattatacaaatagagaaatcatatttagatagataggagaaagctaaatagataaggactataaagtatatacatcatataatctaactattattacaagttatatctcaatatcaatatgttcttcaccatcgtttgatagtgcagttccgaaacagtaaaccatcggctggcggactggtcaactgaagctgataactcccttttagccaatatgaatagtaaataaacccaagaaccactttcactttgaatttacataataacttaataaaagaaaaaaaaaaaaactatgatagaaaaattagcatattcttccattagtttcgcaaatgcgccgacaacgtttttgacttcaaaaacaaaagtagaactcgtgtgtgaaaagcaagattctttcctttctggtataatgttctaatttgtaattaaaatatcgaatattgcttctgaaaggatcatatgtataaatctgacccaaaaaaaaaagctatatttcttagaacatgtttcatgcatgaacgtaaaaagaaaaaaaaaatagacaacatgaatattacggaagggaataaaaagctgaacatataatgaacaagatatagaaaggatttattaaaggacgaagaaaaggagtgaaaattatggattcatttggtgtcaacagataatgtataaagtagagtacttgagtatgttaaaaaaagactaccagagttaaatgacatcataaatgaaactaaaaacagtttgagtttcaatccaaaaatagagtacttgagacttgagaggtagttgaaaaagagttaattaacatcaatgaaatgaagttataaacaagtttgagtttcgatctaaaaactaggatttggaactaaaatttgcctctgaaattattggagtaaaacggtgcaacgacggcgagtggcagatcctttggtagaatagaaggaatgaccacgtgtggttggttgttgtcatcactattatgatttccctcgtaaagccatatttcattatcattgtccccatcttatttcacttcatacatacctagaaacacaaaaatgtctacttacacacatttcagcatatatatcacattttgtatatacataatttaaataataaaccactccaacttttatgaattggaaagggaacataatcaaaaattataccaaaccagagtttctaaaggataaacattttgtggtaaagataaaactaaatagaagtcatactttaaagaaatggagaatagcaattgatttaacatgatacaatctttttttttgaaaaaacatgttacaacgatgaaatagataaagatgtcaaagtttatgctgacaaaatcttttttaaaaagagggtaaaataagtttaacatgaaggtatgagatcaaaaggttatgagtaaaattttctttctatgaaacagcttaacttaataaaatacatatcaaattaaaaaaaaaaagacattgacatatatatcatcgatgtaacacatcaaccaccatctttcttgagagttttcttgttcgtgtgaggagaactaagatgtgttttgaatggaaggaacgaagatgtgagttttaaacacaatcacaatgttttactatggttttgcttatgttttgctatggttttacgtatgttttctttatatttttaatattatcttttaaatatagttcttccaaaaatttcactttcccaaaatatatttaattagtataagaatttatagtttcaattttatagtacatgcccgcctattttatagtatatttaactgtgactttgattatctatcatgtcgtcagtccaagaagccatgttatctaagtttctaacgcaaagcttaacagcttcctcttcggttcacctgaaccgtcaatttcgacggcgatatgttgttgcagttaaacttcaccaacccgaacaagaaaatcagtgtgatgtttgagaaagtttcggtaaaaatattgtttaccgacgaaatgattgccacacaaggtatcttgccgttttcgctaagaaacaacacgactaggctacaaacgatccatttggttgcaaagccgatcttcttgcctataaatgatatggttgagctcagaagacaagtgacgagcaacatgattgaatatgaaatcataagtagattcagagtaaaagttgttattgggtatattaactattcgtattggttaaaagggagttgtcaacttcagttgaccagtccgccagccgatgacttactgtctcggaagtatacactacagaaatatgatgaagaatgtatgatgggtgatatatatataaatattgatatataactcataatactatttagattatgatgtatatctaattagctttcctctatctatccaaatatgatttctcttcttataaaattattgttcttcatatatgattaaatgtgaaattatcacataaactgatagaatcgtacgcaacaatctttttatattgttatggcaaaaaactaagttttgcatatgttttgctttcgtttctaatattatttttaaatctaatttttccaaaaagttcactctcccaaaatatatatataagtagtttaaaaattgtaggtttcaattttagagatatgttagtaatttttttattaaactagagaattgaaaaataaaaactctcgtatataaaccgttacagacacaccgcacgtcacttgagtgt

SEQ ID NO: 401 - DNA, 28 bp, Artificial Sequence
  Made in the lab
cacatcaacaaccactaccacaatacca

SEQ ID NO: 402 - DNA, 27 bp, Artificial Sequence
  Made in the lab
acactcaagtgacgtgcggtgtgtctg

SEQ ID NO: 403 - DNA, 528 bp, Arabidopsis thaliana; identical to SEQ ID NO: 198

SEQ ID NO: 404 - DNA, 30 bp, Arabidopsis thaliana
atgtctataaatataagagaccctcttata

SEQ ID NO: 405 - DNA, 345 bp, Arabidopsis thaliana
atgtctataaatataagagaccctcttatagtaagcagagttgttggagacgttcttgatccgtttaatagatcaatcactctaaaggttacttatggccaaagagaggtgactaatggcttggatctaaggccttctcaggttcaaaacaagccaagagttgagattggtggagaagacctcaggaacttctatactttggttatggtggatccagatgttccaagtcctagcaaccctcacctccgagaatatctccattggttggtgactgatatccctgctacaactggaacaacctttggcaatgagattgtgtgttacgaaaatccaagtcccactgca

SEQ ID NO: 406 - DNA, 33 bp, Arabidopsis thaliana
atgtctataaatataagagaccctcttatagta

SEQ ID NO: 407 - DNA, 36 bp, Arabidopsis thaliana
atgtctataaatataagagaccctcttatagtaagc

SEQ ID NO: 408 - DNA, 417 bp, Arabidopsis thaliana
atgtctataaatataagagaccctcttatagtaagcagagttgttggagacgttcttgatccgtttaatagatcaatcactctaaaggttacttatggccaaagagaggtgactaatggcttggatctaaggccttctcaggttcaaaacaagccaagagttgagattggtggagaagacctcaggaacttctatactttggttatggtggatccagatgttccaagtcctagcaaccctcacctccgagaatatctccattggttggtgactgatatccctgctacaactggaacaacctttggcaatgagattgtgtgttacgaaaatccaagtcccactgcaggaattcatcgtgtcgtgtttatattgtttcgacagcttggcaggcaaacagtgtatgcaccagggtggcgc

SEQ ID NO: 409 - DNA, 39 bp, Arabidopsis thaliana
atgtctataaatataagagaccctcttatagtaagcaga

SEQ ID NO: 410 - DNA, 42 bp, Arabidopsis thaliana
atgtctataaatataagagaccctcttatagtaagcagagtt

SEQ ID NO: 411 - DNA, 459 bp, Arabidopsis thaliana
atgtctataaatataagagaccctcttatagtaagcagagttgttggagacgttcttgatccgtttaatagatcaatcactctaaaggttacttatggccaaagagaggtgactaatggcttggatctaaggccttctcaggttcaaaacaagccaagagttgagattggtggagaagacctcaggaacttctatactttggttatggtggatccagatgttccaagtcctagcaaccctcacctccgagaatatctccattggttggtgactgatatccctgctacaactggaacaacctttggcaatgagattgtgtgttacgaaaatccaagtcccactgcaggaattcatcgtgtcgtgtttatattgtttcgacagcttggcaggcaaacagtgtatgcaccagggtggcgccagaacttcaacactcgcgagtttgctgagatctacaatctc

SEQ ID NO: 412 - DNA, 462 bp, Arabidopsis thaliana
atgtctataaatataagagaccctcttatagtaagcagagttgttggagacgttcttgatccgtttaatagatcaatcactctaaaggttacttatggccaaagagaggtgactaatggcttggatctaaggccttctcaggttcaaaacaagccaagagttgagattggtggagaagacctcaggaacttctatactttggttatggtggatccagatgttccaagtcctagcaaccctcacctccgagaatatctccattggttggtgactgatatccctgctacaactggaacaacctttggcaatgagattgtgtgttacgaaaatccaagtcccactgcaggaattcatcgtgtcgtgtttatattgtttcgacagcttggcaggcaaacagtgtatgcaccagggtggcgccagaacttcaacactcgcgagtttgctgagatctacaatctcggc

SEQ ID NO: 413 - DNA, 465 bp, Arabidopsis thaliana
atgtctataaatataagagaccctcttatagtaagcagagttgttggagacgttcttgatccgtttaatagatcaatcactctaaaggttacttatggccaaagagaggtgactaatggcttggatctaaggccttctcaggttcaaaacaagccaagagttgagattggtggagaagacctcaggaacttctatactttggttatggtggatccagatgttccaagtcctagcaaccctcacctccgagaatatctccattggttggtgactgatatccctgctacaactggaacaacctttggcaatgagattgtgtgttacgaaaatccaagtcccactgcaggaattcatcgtgtcgtgtttatattgtttcgacagcttggcaggcaaacagtgtatgcaccagggtggcgccagaacttcaacactcgcgagtttgctgagatctacaatctcggcctt

SEQ ID NO: 414 - DNA, 468 bp, Arabidopsis thaliana
atgtctataaatataagagaccctcttatagtaagcagagttgttggagacgttcttgatccgtttaatagatcaatcactctaaaggttacttatggccaaagagaggtgactaatggcttggatctaaggccttctcaggttcaaaacaagccaagagttgagattggtggagaagacctcaggaacttctatactttggttatggtggatccagatgttccaagtcctagcaaccctcacctccgagaatatctccattggttggtgactgatatccctgctacaactggaacaacctttggcaatgagattgtgtgttacgaaaatccaagtcccactgcaggaattcatcgtgtcgtgtttatattgtttcgacagcttggcaggcaaacagtgtatgcaccagggtggcgccagaacttcaacactcgcgagtttgctgagatctacaatctcggccttccc

SEQ ID NO: 415 - DNA, 471 bp, Arabidopsis thaliana
atgtctataaatataagagaccctcttatagtaagcagagttgttggagacgttcttgatccgtttaatagatcaatcactctaaaggttacttatggccaaagagaggtgactaatggcttggatctaaggccttctcaggttcaaaacaagccaagagttgagattggtggagaagacctcaggaacttctatactttggttatggtggatccagatgttccaagtcctagcaaccctcacctccgagaatatctccattggttggtgactgatatccctgctacaactggaacaacctttggcaatgagattgtgtgttacgaaaatccaagtcccactgcaggaattcatcgtgtcgtgtttatattgtttcgacagcttggcaggcaaacagtgtatgcaccagggtggcgccagaacttcaacactcgcgagtttgctgagatctacaatctcggccttcccgtg

SEQ ID NO: 416 - DNA, 474 bp, Arabidopsis thaliana
atgtctataaatataagagaccctcttatagtaagcagagttgttggagacgttcttgatccgtttaatagatcaatcactctaaaggttacttatggccaaagagaggtgactaatggcttggatctaaggccttctcaggttcaaaacaagccaagagttgagattggtggagaagacctcaggaacttctatactttggttatggtggatccagatgttccaagtcctagcaaccctcacctccgagaatatctccattggttggtgactgatatccctgctacaactggaacaacctttggcaatgagattgtgtgttacgaaaatccaagtcccactgcaggaattcatcgtgtcgtgtttatattgtttcgacagcttggcaggcaaacagtgtatgcaccagggtggcgccagaacttcaacactcgcgagtttgctgagatctacaatctcggccttcccgtggcc

SEQ ID NO: 417 - DNA, 477 bp, Arabidopsis thaliana
atgtctataaatataagagaccctcttatagtaagcagagttgttggagacgttcttgatccgtttaatagatcaatcactctaaaggttacttatggccaaagagaggtgactaatggcttggatctaaggccttctcaggttcaaaacaagccaagagttgagattggtggagaagacctcaggaacttctatactttggttatggtggatccagatgttccaagtcctagcaaccctcacctccgagaatatctccattggttggtgactgatatccctgctacaactggaacaacctttggcaatgagattgtgtgttacgaaaatccaagtcccactgcaggaattcatcgtgtcgtgtttatattgtttcgacagcttggcaggcaaacagtgtatgcaccagggtggcgccagaacttcaacactcgcgagtttgctgagatctacaatctcggccttcccgtggccgca

SEQ ID NO: 418 - DNA, 45 bp, Arabidopsis thaliana
atgtctataaatataagagaccctcttatagtaagcagagttgtt

SEQ ID NO: 419 - DNA, 480 bp, Arabidopsis thaliana
atgtctataaatataagagaccctcttatagtaagcagagttgttggagacgttcttgatccgtttaatagatcaatcactctaaaggttacttatggccaaagagaggtgactaatggcttggatctaaggccttctcaggttcaaaacaagccaagagttgagattggtggagaagacctcaggaacttctatactttggttatggtggatccagatgttccaagtcctagcaaccctcacctccgagaatatctccattggttggtgactgatatccctgctacaactggaacaacctttggcaatgagattgtgtgttacgaaaatccaagtcccactgcaggaattcatcgtgtcgtgtttatattgtttcgacagcttggcaggcaaacagtgtatgcaccagggtggcgccagaacttcaacactcgcgagtttgctgagatctacaatctcggccttcccgtggccgcagtt

SEQ ID NO: 420 - DNA, 483 bp, Arabidopsis thaliana
atgtctataaatataagagaccctcttatagtaagcagagttgttggagacgttcttgatccgtttaatagatcaatcactctaaaggttacttatggccaaagagaggtgactaatggcttggatctaaggccttctcaggttcaaaacaagccaagagttgagattggtggagaagacctcaggaacttctatactttggttatggtggatccagatgttccaagtcctagcaaccctcacctccgagaatatctccattggttggtgactgatatccctgctacaactggaacaacctttggcaatgagattgtgtgttacgaaaatccaagtcccactgcaggaattcatcgtgtcgtgtttatattgtttcgacagcttggcaggcaaacagtgtatgcaccagggtggcgccagaacttcaacactcgcgagtttgctgagatctacaatctcggccttcccgtggccgcagttttc

SEQ ID NO: 421 - DNA, 486 bp, Arabidopsis thaliana
atgtctataaatataagagaccctcttatagtaagcagagttgttggagacgttcttgatccgtttaatagatcaatcactctaaaggttacttatggccaaagagaggtgactaatggcttggatctaaggccttctcaggttcaaaacaagccaagagttgagattggtggagaagacctcaggaacttctatactttggttatggtggatccagatgttccaagtcctagcaaccctcacctccgagaatatctccattggttggtgactgatatccctgctacaactggaacaacctttggcaatgagattgtgtgttacgaaaatccaagtcccactgcaggaattcatcgtgtcgtgtttatattgtttcgacagcttggcaggcaaacagtgtatgcaccagggtggcgccagaacttcaacactcgcgagtttgctgagatctacaatctcggccttcccgtggccgcagttttctac

SEQ ID NO: 422 - DNA, 489 bp, Arabidopsis thaliana
atgtctataaatataagagaccctcttatagtaagcagagttgttggagacgttcttgatccgtttaatagatcaatcactctaaaggttacttatggccaaagagaggtgactaatggcttggatctaaggccttctcaggttcaaaacaagccaagagttgagattggtggagaagacctcaggaacttctatactttggttatggtggatccagatgttccaagtcctagcaaccctcacctccgagaatatctccattggttggtgactgatatccctgctacaactggaacaacctttggcaatgagattgtgtgttacgaaaatccaagtcccactgcaggaattcatcgtgtcgtgtttatattgtttcgacagcttggcaggcaaacagtgtatgcaccagggtggcgccagaacttcaacactcgcgagtttgctgagatctacaatctcggccttcccgtggccgcagttttctacaat

SEQ ID NO: 423 - DNA, 492 bp, Arabidopsis thaliana
atgtctataaatataagagaccctcttatagtaagcagagttgttggagacgttcttgatccgtttaatagatcaatcactctaaaggttacttatggccaaagagaggtgactaatggcttggatctaaggccttctcaggttcaaaacaagccaagagttgagattggtggagaagacctcaggaacttctatactttggttatggtggatccagatgttccaagtcctagcaaccctcacctccgagaatatctccattggttggtgactgatatccctgctacaactggaacaacctttggcaatgagattgtgtgttacgaaaatccaagtcccactgcaggaattcatcgtgtcgtgtttatattgtttcgacagcttggcaggcaaacagtgtatgcaccagggtggcgccagaacttcaacactcgcgagtttgctgagatctacaatctcggccttcccgtggccgcagttttctacaattgt

SEQ ID NO: 424 - DNA, 495 bp, Arabidopsis thaliana
atgtctataaatataagagaccctcttatagtaagcagagttgttggagacgttcttgatccgtttaatagatcaatcactctaaaggttacttatggccaaagagaggtgactaatggcttggatctaaggccttctcaggttcaaaacaagccaagagttgagattggtggagaagacctcaggaacttctatactttggttatggtggatccagatgttccaagtcctagcaaccctcacctccgagaatatctccattggttggtgactgatatccctgctacaactggaacaacctttggcaatgagattgtgtgttacgaaaatccaagtcccactgcaggaattcatcgtgtcgtgtttatattgtttcgacagcttggcaggcaaacagtgtatgcaccagggtggcgccagaacttcaacactcgcgagtttgctgagatctacaatctcggccttcccgtggccgcagttttctacaattgtcag

SEQ ID NO: 425 - DNA, 498 bp, Arabidopsis thaliana
atgtctataaatataagagaccctcttatagtaagcagagttgttggagacgttcttgatccgtttaatagatcaatcactctaaaggttacttatggccaaagagaggtgactaatggcttggatctaaggccttctcaggttcaaaacaagccaagagttgagattggtggagaagacctcaggaacttctatactttggttatggtggatccagatgttccaagtcctagcaaccctcacctccgagaatatctccattggttggtgactgatatccctgctacaactggaacaacctttggcaatgagattgtgtgttacgaaaatccaagtcccactgcaggaattcatcgtgtcgtgtttatattgtttcgacagcttggcaggcaaacagtgtatgcaccagggtggcgccagaacttcaacactcgcgagtttgctgagatctacaatctcggccttcccgtggccgcagttttctacaattgtcagagg

SEQ ID NO: 426 - DNA, 501 bp, Arabidopsis thaliana
atgtctataaatataagagaccctcttatagtaagcagagttgttggagacgttcttgatccgtttaatagatcaatcactctaaaggttacttatggccaaagagaggtgactaatggcttggatctaaggccttctcaggttcaaaacaagccaagagttgagattggtggagaagacctcaggaacttctatactttggttatggtggatccagatgttccaagtcctagcaaccctcacctccgagaatatctccattggttggtgactgatatccctgctacaactggaacaacctttggcaatgagattgtgtgttacgaaaatccaagtcccactgcaggaattcatcgtgtcgtgtttatattgtttcgacagcttggcaggcaaacagtgtatgcaccagggtggcgccagaacttcaacactcgcgagtttgctgagatctacaatctcggccttcccgtggccgcagttttctacaattgtcagagggag

SEQ ID NO: 427 - DNA, 504 bp, Arabidopsis thaliana
atgtctataaatataagagaccctcttatagtaagcagagttgttggagacgttcttgatccgtttaatagatcaatcactctaaaggttacttatggccaaagagaggtgactaatggcttggatctaaggccttctcaggttcaaaacaagccaagagttgagattggtggagaagacctcaggaacttctatactttggttatggtggatccagatgttccaagtcctagcaaccctcacctccgagaatatctccattggttggtgactgatatccctgctacaactggaacaacctttggcaatgagattgtgtgttacgaaaatccaagtcccactgcaggaattcatcgtgtcgtgtttatattgtttcgacagcttggcaggcaaacagtgtatgcaccagggtggcgccagaacttcaacactcgcgagtttgctgagatctacaatctcggccttcccgtggccgcagttttctacaattgtcagagggagagt

SEQ ID NO: 428 - DNA, 507 bp, Arabidopsis thaliana
atgtctataaatataagagaccctcttatagtaagcagagttgttggagacgttcttgatccgtttaatagatcaatcactctaaaggttacttatggccaaagagaggtgactaatggcttggatctaaggccttctcaggttcaaaacaagccaagagttgagattggtggagaagacctcaggaacttctatactttggttatggtggatccagatgttccaagtcctagcaaccctcacctccgagaatatctccattggttggtgactgatatccctgctacaactggaacaacctttggcaatgagattgtgtgttacgaaaatccaagtcccactgcaggaattcatcgtgtcgtgtttatattgtttcgacagcttggcaggcaaacagtgtatgcaccagggtggcgccagaacttcaacactcgcgagtttgctgagatctacaatctcggccttcccgtggccgcagttttctacaattgtcagagggagagtggc

SEQ ID NO: 429 - DNA, 48 bp, Arabidopsis thaliana
atgtctataaatataagagaccctcttatagtaagcagagttgttgga

SEQ ID NO: 430 - DNA, 510 bp, Arabidopsis thaliana
atgtctataaatataagagaccctcttatagtaagcagagttgttggagacgttcttgatccgtttaatagatcaatcactctaaaggttacttatggccaaagagaggtgactaatggcttggatctaaggccttctcaggttcaaaacaagccaagagttgagattggtggagaagacctcaggaacttctatactttggttatggtggatccagatgttccaagtcctagcaaccctcacctccgagaatatctccattggttggtgactgatatccctgctacaactggaacaacctttggcaatgagattgtgtgttacgaaaatccaagtcccactgcaggaattcatcgtgtcgtgtttatattgtttcgacagcttggcaggcaaacagtgtatgcaccagggtggcgccagaacttcaacactcgcgagtttgctgagatctacaatctcggccttcccgtggccgcagttttctacaattgtcagagggagagtggctgc

SEQ ID NO: 431 - DNA, 513 bp, Arabidopsis thaliana
atgtctataaatataagagaccctcttatagtaagcagagttgttggagacgttcttgatccgtttaatagatcaatcactctaaaggttacttatggccaaagagaggtgactaatggcttggatctaaggccttctcaggttcaaaacaagccaagagttgagattggtggagaagacctcaggaacttctatactttggttatggtggatccagatgttccaagtcctagcaaccctcacctccgagaatatctccattggttggtgactgatatccctgctacaactggaacaacctttggcaatgagattgtgtgttacgaaaatccaagtcccactgcaggaattcatcgtgtcgtgtttatattgtttcgacagcttggcaggcaaacagtgtatgcaccagggtggcgccagaacttcaacactcgcgagtttgctgagatctacaatctcggccttcccgtggccgcagttttctacaattgtcagagggagagtggctgcgga

SEQ ID NO: 432 - DNA, 516 bp, Arabidopsis thaliana
atgtctataaatataagagaccctcttatagtaagcagagttgttggagacgttcttgatccgtttaatagatcaatcactctaaaggttacttatggccaaagagaggtgactaatggcttggatctaaggccttctcaggttcaaaacaagccaagagttgagattggtggagaagacctcaggaacttctatactttggttatggtggatccagatgttccaagtcctagcaaccctcacctccgagaatatctccattggttggtgactgatatccctgctacaactggaacaacctttggcaatgagattgtgtgttacgaaaatccaagtcccactgcaggaattcatcgtgtcgtgtttatattgtttcgacagcttggcaggcaaacagtgtatgcaccagggtggcgccagaacttcaacactcgcgagtttgctgagatctacaatctcggccttcccgtggccgcagttttctacaattgtcagagggagagtggctgcggagga

SEQ ID NO: 433 - DNA, 519 bp, Arabidopsis thaliana
atgtctataaatataagagaccctcttatagtaagcagagttgttggagacgttcttgatccgtttaatagatcaatcactctaaaggttacttatggccaaagagaggtgactaatggcttggatctaaggccttctcaggttcaaaacaagccaagagttgagattggtggagaagacctcaggaacttctatactttggttatggtggatccagatgttccaagtcctagcaaccctcacctccgagaatatctccattggttggtgactgatatccctgctacaactggaacaacctttggcaatgagattgtgtgttacgaaaatccaagtcccactgcaggaattcatcgtgtcgtgtttatattgtttcgacagcttggcaggcaaacagtgtatgcaccagggtggcgccagaacttcaacactcgcgagtttgctgagatctacaatctcggccttcccgtggccgcagttttctacaattgtcagagggagagtggctgcggaggaaga

SEQ ID NO: 434 - DNA, 522 bp, Arabidopsis thaliana
atgtctataaatataagagaccctcttatagtaagcagagttgttggagacgttcttgatccgtttaatagatcaatcactctaaaggttacttatggccaaagagaggtgactaatggcttggatctaaggccttctcaggttcaaaacaagccaagagttgagattggtggagaagacctcaggaacttctatactttggttatggtggatccagatgttccaagtcctagcaaccctcacctccgagaatatctccattggttggtgactgatatccctgctacaactggaacaacctttggcaatgagattgtgtgttacgaaaatccaagtcccactgcaggaattcatcgtgtcgtgtttatattgtttcgacagcttggcaggcaaacagtgtatgcaccagggtggcgccagaacttcaacactcgcgagtttgctgagatctacaatctcggccttcccgtggccgcagttttctacaattgtcagagggagagtggctgcggaggaagaaga

SEQ ID NO: 435 - DNA, 51 bp, Arabidopsis thaliana
atgtctataaatataagagaccctcttatagtaagcagagttgttggagac

SEQ ID NO: 436 - DNA, 54 bp, Arabidopsis thaliana
atgtctataaatataagagaccctcttatagtaagcagagttgttggagacgtt

SEQ ID NO: 437 - DNA, 57 bp, Arabidopsis thaliana
atgtctataaatataagagaccctcttatagtaagcagagttgttggagacgttctt

SEQ ID NO: 438 - DNA, 60 bp, Arabidopsis thaliana
atgtctataaatataagagaccctcttatagtaagcagagttgttggagacgttcttgat

SEQ ID NO: 439 - DNA, 63 bp, Arabidopsis thaliana
atgtctataaatataagagaccctcttatagtaagcagagttgttggagacgttcttgatccg

SEQ ID NO: 440 - DNA, 66 bp, Arabidopsis thaliana
atgtctataaatataagagaccctcttatagtaagcagagttgttggagacgttcttgatccgttt

SEQ ID NO: 441 - DNA, 69 bp, Arabidopsis thaliana
atgtctataaatataagagaccctcttatagtaagcagagttgttggagacgttcttgatccgtttaat

SEQ ID NO: 442 - DNA, 72 bp, Arabidopsis thaliana
atgtctataaatataagagaccctcttatagtaagcagagttgttggagacgttcttgatccgtttaataga

SEQ ID NO: 443 - DNA, 75 bp, Arabidopsis thaliana
atgtctataaatataagagaccctcttatagtaagcagagttgttggagacgttcttgatccgtttaatagatca

SEQ ID NO: 444 - DNA, 78 bp, Arabidopsis thaliana
atgtctataaatataagagaccctcttatagtaagcagagttgttggagacgttcttgatccgtttaatagatcaatc

SEQ ID NO: 445 - DNA, 81 bp, Arabidopsis thaliana
atgtctataaatataagagaccctcttatagtaagcagagttgttggagacgttcttgatccgtttaatagatcaatcact

SEQ ID NO: 446 - DNA, 18 bp, Arabidopsis thaliana
atgtctataaatataaga

SEQ ID NO: 447 - DNA, 21 bp, Arabidopsis thaliana
atgtctataaatataagagac

SEQ ID NO: 448 - DNA, 267 bp, Arabidopsis thaliana
atgtctataaatataagagaccctcttatagtaagcagagttgttggagacgttcttgatccgtttaatagatcaatcactctaaaggttacttatggccaaagagaggtgactaatggcttggatctaaggccttctcaggttcaaaacaagccaagagttgagattggtggagaagacctcaggaacttctatactttggttatggtggatccagatgttccaagtcctagcaaccctcacctccgagaatatctccattggttg

SEQ ID NO: 449 - DNA, 24 bp, Arabidopsis thaliana
atgtctataaatataagagaccct

SEQ ID NO: 450 - DNA, 27 bp, Arabidopsis thaliana
atgtctataaatataagagaccctctt

SEQ ID NO: 451 - DNA, 498 bp, Arabidopsis thaliana
gtaagcagagttgttggagacgttcttgatccgtttaatagatcaatcactctaaaggttacttatggccaaagagaggtgactaatggcttggatctaaggccttctcaggttcaaaacaagccaagagttgagattggtggagaagacctcaggaacttctatactttggttatggtggatccagatgttccaagtcctagcaaccctcacctccgagaatatctccattggttggtgactgatatccctgctacaactggaacaacctttggcaatgagattgtgtgttacgaaaatccaagtcccactgcaggaattcatcgtgtcgtgtttatattgtttcgacagcttggcaggcaaacagtgtatgcaccagggtggcgccagaacttcaacactcgcgagtttgctgagatctacaatctcggccttcccgtggccgcagttttctacaattgtcagagggagagtggctgcggaggaagaagactttag

SEQ ID NO: 452 - DNA, 495 bp, Arabidopsis thaliana
agcagagttgttggagacgttcttgatccgtttaatagatcaatcactctaaaggttacttatggccaaagagaggtgactaatggcttggatctaaggccttctcaggttcaaaacaagccaagagttgagattggtggagaagacctcaggaacttctatactttggttatggtggatccagatgttccaagtcctagcaaccctcacctccgagaatatctccattggttggtgactgatatccctgctacaactggaacaacctttggcaatgagattgtgtgttacgaaaatccaagtcccactgcaggaattcatcgtgtcgtgtttatattgtttcgacagcttggcaggcaaacagtgtatgcaccagggtggcgccagaacttcaacactcgcgagtttgctgagatctacaatctcggccttcccgtggccgcagttttctacaattgtcagagggagagtggctgcggaggaagaagactttag

SEQ ID NO: 453 - DNA, 492 bp, Arabidopsis thaliana
agagttgttggagacgttcttgatccgtttaatagatcaatcactctaaaggttacttatggccaaagagaggtgactaatggcttggatctaaggccttctcaggttcaaaacaagccaagagttgagattggtggagaagacctcaggaacttctatactttggttatggtggatccagatgttccaagtcctagcaaccctcacctccgagaatatctccattggttggtgactgatatccctgctacaactggaacaacctttggcaatgagattgtgtgttacgaaaatccaagtcccactgcaggaattcatcgtgtcgtgtttatattgtttcgacagcttggcaggcaaacagtgtatgcaccagggtggcgccagaacttcaacactcgcgagtttgctgagatctacaatctcggccttcccgtggccgcagttttctacaattgtcagagggagagtggctgcggaggaagaagactttag

SEQ ID NO: 454 - DNA, 489 bp, Arabidopsis thaliana
gttgttggagacgttcttgatccgtttaatagatcaatcactctaaaggttacttatggccaaagagaggtgactaatggcttggatctaaggccttctcaggttcaaaacaagccaagagttgagattggtggagaagacctcaggaacttctatactttggttatggtggatccagatgttccaagtcctagcaaccctcacctccgagaatatctccattggttggtgactgatatccctgctacaactggaacaacctttggcaatgagattgtgtgttacgaaaatccaagtcccactgcaggaattcatcgtgtcgtgtttatattgtttcgacagcttggcaggcaaacagtgtatgcaccagggtggcgccagaacttcaacactcgcgagtttgctgagatctacaatctcggccttcccgtggccgcagttttctacaattgtcagagggagagtggctgcggaggaagaagactttag

SEQ ID NO: 455 - DNA, 486 bp, Arabidopsis thaliana
gttggagacgttcttgatccgtttaatagatcaatcactctaaaggttacttatggccaaagagaggtgactaatggcttggatctaaggccttctcaggttcaaaacaagccaagagttgagattggtggagaagacctcaggaacttctatactttggttatggtggatccagatgttccaagtcctagcaaccctcacctccgagaatatctccattggttggtgactgatatccctgctacaactggaacaacctttggcaatgagattgtgtgttacgaaaatccaagtcccactgcaggaattcatcgtgtcgtgtttatattgtttcgacagcttggcaggcaaacagtgtatgcaccagggtggcgccagaacttcaacactcgcgagtttgctgagatctacaatctcggccttcccgtggccgcagttttctacaattgtcagagggagagtggctgcggaggaagaagactttag

SEQ ID NO: 456 - DNA, 483 bp, Arabidopsis thaliana
ggagacgttcttgatccgtttaatagatcaatcactctaaaggttacttatggccaaagagaggtgactaatggcttggatctaaggccttctcaggttcaaaacaagccaagagttgagattggtggagaagacctcaggaacttctatactttggttatggtggatccagatgttccaagtcctagcaaccctcacctccgagaatatctccattggttggtgactgatatccctgctacaactggaacaacctttggcaatgagattgtgtgttacgaaaatccaagtcccactgcaggaattcatcgtgtcgtgtttatattgtttcgacagcttggcaggcaaacagtgtatgcaccagggtggcgccagaacttcaacactcgcgagtttgctgagatctacaatctcggccttcccgtggccgcagttttctacaattgtcagagggagagtggctgcggaggaagaagactttag

SEQ ID NO: 457 - DNA, 480 bp, Arabidopsis thaliana
gacgttcttgatccgtttaatagatcaatcactctaaaggttacttatggccaaagagaggtgactaatggcttggatctaaggccttctcaggttcaaaacaagccaagagttgagattggtggagaagacctcaggaacttctatactttggttatggtggatccagatgttccaagtcctagcaaccctcacctccgagaatatctccattggttggtgactgatatccctgctacaactggaacaacctttggcaatgagattgtgtgttacgaaaatccaagtcccactgcaggaattcatcgtgtcgtgtttatattgtttcgacagcttggcaggcaaacagtgtatgcaccagggtggcgccagaacttcaacactcgcgagtttgctgagatctacaatctcggccttcccgtggccgcagttttctacaattgtcagagggagagtggctgcggaggaagaagactttag

SEQ ID NO: 458 - DNA, 477 bp, Arabidopsis thaliana
gttcttgatccgtttaatagatcaatcactctaaaggttacttatggccaaagagaggtgactaatggcttggatctaaggccttctcaggttcaaaacaagccaagagttgagattggtggagaagacctcaggaacttctatactttggttatggtggatccagatgttccaagtcctagcaaccctcacctccgagaatatctccattggttggtgactgatatccctgctacaactggaacaacctttggcaatgagattgtgtgttacgaaaatccaagtcccactgcaggaattcatcgtgtcgtgtttatattgtttcgacagcttggcaggcaaacagtgtatgcaccagggtggcgccagaacttcaacactcgcgagtttgctgagatctacaatctcggccttcccgtggccgcagttttctacaattgtcagagggagagtggctgcggaggaagaagactttag

SEQ ID NO: 459 - DNA, 474 bp, Arabidopsis thaliana
cttgatccgtttaatagatcaatcactctaaaggttacttatggccaaagagaggtgactaatggcttggatctaaggccttctcaggttcaaaacaagccaagagttgagattggtggagaagacctcaggaacttctatactttggttatggtggatccagatgttccaagtcctagcaaccctcacctccgagaatatctccattggttggtgactgatatccctgctacaactggaacaacctttggcaatgagattgtgtgttacgaaaatccaagtcccactgcaggaattcatcgtgtcgtgtttatattgtttcgacagcttggcaggcaaacagtgtatgcaccagggtggcgccagaacttcaacactcgcgagtttgctgagatctacaatctcggccttcccgtggccgcagttttctacaattgtcagagggagagtggctgcggaggaagaagactttag

SEQ ID NO: 460 - DNA, 471 bp, Arabidopsis thaliana
gatccgtttaatagatcaatcactctaaaggttacttatggccaaagagaggtgactaatggcttggatctaaggccttctcaggttcaaaacaagccaagagttgagattggtggagaagacctcaggaacttctatactttggttatggtggatccagatgttccaagtcctagcaaccctcacctccgagaatatctccattggttggtgactgatatccctgctacaactggaacaacctttggcaatgagattgtgtgttacgaaaatccaagtcccactgcaggaattcatcgtgtcgtgtttatattgtttcgacagcttggcaggcaaacagtgtatgcaccagggtggcgccagaacttcaacactcgcgagtttgctgagatctacaatctcggccttcccgtggccgcagttttctacaattgtcagagggagagtggctgcggaggaagaagactttag

SEQ ID NO: 461 - DNA, 525 bp, Arabidopsis thaliana
tctataaatataagagaccctcttatagtaagcagagttgttggagacgttcttgatccgtttaatagatcaatcactctaaaggttacttatggccaaagagaggtgactaatggcttggatctaaggccttctcaggttcaaaacaagccaagagttgagattggtggagaagacctcaggaacttctatactttggttatggtggatccagatgttccaagtcctagcaaccctcacctccgagaatatctccattggttggtgactgatatccctgctacaactggaacaacctttggcaatgagattgtgtgttacgaaaatccaagtcccactgcaggaattcatcgtgtcgtgtttatattgtttcgacagcttggcaggcaaacagtgtatgcaccagggtggcgccagaacttcaacactcgcgagtttgctgagatctacaatctcggccttcccgtggccgcagttttctacaattgtcagagggagagtggctgcggaggaagaagactttag

SEQ ID NO: 462 - DNA, 468 bp, Arabidopsis thaliana
ccgtttaatagatcaatcactctaaaggttacttatggccaaagagaggtgactaatggcttggatctaaggccttctcaggttcaaaacaagccaagagttgagattggtggagaagacctcaggaacttctatactttggttatggtggatccagatgttccaagtcctagcaaccctcacctccgagaatatctccattggttggtgactgatatccctgctacaactggaacaacctttggcaatgagattgtgtgttacgaaaatccaagtcccactgcaggaattcatcgtgtcgtgtttatattgtttcgacagcttggcaggcaaacagtgtatgcaccagggtggcgccagaacttcaacactcgcgagtttgctgagatctacaatctcggccttcccgtggccgcagttttctacaattgtcagagggagagtggctgcggaggaagaagactttag

SEQ ID NO: 463 - DNA, 465 bp, Arabidopsis thaliana
tttaatagatcaatcactctaaaggttacttatggccaaagagaggtgactaatggcttggatctaaggccttctcaggttcaaaacaagccaagagttgagattggtggagaagacctcaggaacttctatactttggttatggtggatccagatgttccaagtcctagcaaccctcacctccgagaatatctccattggttggtgactgatatccctgctacaactggaacaacctttggcaatgagattgtgtgttacgaaaatccaagtcccactgcaggaattcatcgtgtcgtgtttatattgtttcgacagcttggcaggcaaacagtgtatgcaccagggtggcgccagaacttcaacactcgcgagtttgctgagatctacaatctcggccttcccgtggccgcagttttctacaattgtcagagggagagtggctgcggaggaagaagactttag

SEQ ID NO: 464 - DNA, 462 bp, Arabidopsis thaliana
aatagatcaatcactctaaaggttacttatggccaaagagaggtgactaatggcttggatctaaggccttctcaggttcaaaacaagccaagagttgagattggtggagaagacctcaggaacttctatactttggttatggtggatccagatgttccaagtcctagcaaccctcacctccgagaatatctccattggttggtgactgatatccctgctacaactggaacaacctttggcaatgagattgtgtgttacgaaaatccaagtcccactgcaggaattcatcgtgtcgtgtttatattgtttcgacagcttggcaggcaaacagtgtatgcaccagggtggcgccagaacttcaacactcgcgagtttgctgagatctacaatctcggccttcccgtggccgcagttttctacaattgtcagagggagagtggctgcggaggaagaagactttag

SEQ ID NO: 465 - DNA, 459 bp, Arabidopsis thaliana
agatcaatcactctaaaggttacttatggccaaagagaggtgactaatggcttggatctaaggccttctcaggttcaaaacaagccaagagttgagattggtggagaagacctcaggaacttctatactttggttatggtggatccagatgttccaagtcctagcaaccctcacctccgagaatatctccattggttggtgactgatatccctgctacaactggaacaacctttggcaatgagattgtgtgttacgaaaatccaagtcccactgcaggaattcatcgtgtcgtgtttatattgtttcgacagcttggcaggcaaacagtgtatgcaccagggtggcgccagaacttcaacactcgcgagtttgctgagatctacaatctcggccttcccgtggccgcagttttctacaattgtcagagggagagtggctgcggaggaagaagactttag

SEQ ID NO: 466 - DNA, 456 bp, Arabidopsis thaliana
tcaatcactctaaaggttacttatggccaaagagaggtgactaatggcttggatctaaggccttctcaggttcaaaacaagccaagagttgagattggtggagaagacctcaggaacttctatactttggttatggtggatccagatgttccaagtcctagcaaccctcacctccgagaatatctccattggttggtgactgatatccctgctacaactggaacaacctttggcaatgagattgtgtgttacgaaaatccaagtcccactgcaggaattcatcgtgtcgtgtttatattgtttcgacagcttggcaggcaaacagtgtatgcaccagggtggcgccagaacttcaacactcgcgagtttgctgagatctacaatctcggccttcccgtggccgcagttttctacaattgtcagagggagagtggctgcggaggaagaagactttag

SEQ ID NO: 467 - DNA, 453 bp, Arabidopsis thaliana
atcactctaaaggttacttatggccaaagagaggtgactaatggcttggatctaaggccttctcaggttcaaaacaagccaagagttgagattggtggagaagacctcaggaacttctatactttggttatggtggatccagatgttccaagtcctagcaaccctcacctccgagaatatctccattggttggtgactgatatccctgctacaactggaacaacctttggcaatgagattgtgtgttacgaaaatccaagtcccactgcaggaattcatcgtgtcgtgtttatattgtttcgacagcttggcaggcaaacagtgtatgcaccagggtggcgccagaacttcaacactcgcgagtttgctgagatctacaatctcggccttcccgtggccgcagttttctacaattgtcagagggagagtggctgcggaggaagaagactttag

SEQ ID NO: 468 - DNA, 450 bp, Arabidopsis thaliana
actctaaaggttacttatggccaaagagaggtgactaatggcttggatctaaggccttctcaggttcaaaacaagccaagagttgagattggtggagaagacctcaggaacttctatactttggttatggtggatccagatgttccaagtcctagcaaccctcacctccgagaatatctccattggttggtgactgatatccctgctacaactggaacaacctttggcaatgagattgtgtgttacgaaaatccaagtcccactgcaggaattcatcgtgtcgtgtttatattgtttcgacagcttggcaggcaaacagtgtatgcaccagggtggcgccagaacttcaacactcgcgagtttgctgagatctacaatctcggccttcccgtggccgcagttttctacaattgtcagagggagagtggctgcggaggaagaagactttag

SEQ ID NO: 469 - DNA, 447 bp, Arabidopsis thaliana
ctaaaggttacttatggccaaagagaggtgactaatggcttggatctaaggccttctcaggttcaaaacaagccaagagttgagattggtggagaagacctcaggaacttctatactttggttatggtggatccagatgttccaagtcctagcaaccctcacctccgagaatatctccattggttggtgactgatatccctgctacaactggaacaacctttggcaatgagattgtgtgttacgaaaatccaagtcccactgcaggaattcatcgtgtcgtgtttatattgtttcgacagcttggcaggcaaacagtgtatgcaccagggtggcgccagaacttcaacactcgcgagtttgctgagatctacaatctcggccttcccgtggccgcagttttctacaattgtcagagggagagtggctgcggaggaagaagactttag

SEQ ID NO: 470 - DNA, 444 bp, Arabidopsis thaliana
aaggttacttatggccaaagagaggtgactaatggcttggatctaaggccttctcaggttcaaaacaagccaagagttgagattggtggagaagacctcaggaacttctatactttggttatggtggatccagatgttccaagtcctagcaaccctcacctccgagaatatctccattggttggtgactgatatccctgctacaactggaacaacctttggcaatgagattgtgtgttacgaaaatccaagtcccactgcaggaattcatcgtgtcgtgtttatattgtttcgacagcttggcaggcaaacagtgtatgcaccagggtggcgccagaacttcaacactcgcgagtttgctgagatctacaatctcggccttcccgtggccgcagttttctacaattgtcagagggagagtggctgcggaggaagaagactttag

SEQ ID NO: 471 - DNA, 441 bp, Arabidopsis thaliana
gttacttatggccaaagagaggtgactaatggcttggatctaaggccttctcaggttcaaaacaagccaagagttgagattggtggagaagacctcaggaacttctatactttggttatggtggatccagatgttccaagtcctagcaaccctcacctccgagaatatctccattggttggtgactgatatccctgctacaactggaacaacctttggcaatgagattgtgtgttacgaaaatccaagtcccactgcaggaattcatcgtgtcgtgtttatattgtttcgacagcttggcaggcaaacagtgtatgcaccagggtggcgccagaacttcaacactcgcgagtttgctgagatctacaatctcggccttcccgtggccgcagttttctacaattgtcagagggagagtggctgcggaggaagaagactttag

SEQ ID NO: 472 - DNA, 414 bp, Arabidopsis thaliana
aatggcttggatctaaggccttctcaggttcaaaacaagccaagagttgagattggtggagaagacctcaggaacttctatactttggttatggtggatccagatgttccaagtcctagcaaccctcacctccgagaatatctccattggttggtgactgatatccctgctacaactggaacaacctttggcaatgagattgtgtgttacgaaaatccaagtcccactgcaggaattcatcgtgtcgtgtttatattgtttcgacagcttggcaggcaaacagtgtatgcaccagggtggcgccagaacttcaacactcgcgagtttgctgagatctacaatctcggccttcccgtggccgcagttttctacaattgtcagagggagagtggctgcggaggaagaagactttag

SEQ ID NO: 473 - DNA, 381 bp, Arabidopsis thaliana
aacaagccaagagttgagattggtggagaagacctcaggaacttctatactttggttatggtggatccagatgttccaagtcctagcaaccctcacctccgagaatatctccattggttggtgactgatatccctgctacaactggaacaacctttggcaatgagattgtgtgttacgaaaatccaagtcccactgcaggaattcatcgtgtcgtgtttatattgtttcgacagcttggcaggcaaacagtgtatgcaccagggtggcgccagaacttcaacactcgcgagtttgctgagatctacaatctcggccttcccgtggccgcagttttctacaattgtcagagggagagtggctgcggaggaagaagactttag

SEQ ID NO: 474 - DNA, 513 bp, Arabidopsis thaliana
agagaccctcttatagtaagcagagttgttggagacgttcttgatccgtttaatagatcaatcactctaaaggttacttatggccaaagagaggtgactaatggcttggatctaaggccttctcaggttcaaaacaagccaagagttgagattggtggagaagacctcaggaacttctatactttggttatggtggatccagatgttccaagtcctagcaaccctcacctccgagaatatctccattggttggtgactgatatccctgctacaactggaacaacctttggcaatgagattgtgtgttacgaaaatccaagtcccactgcaggaattcatcgtgtcgtgtttatattgtttcgacagcttggcaggcaaacagtgtatgcaccagggtggcgccagaacttcaacactcgcgagtttgctgagatctacaatctcggccttcccgtggccgcagttttctacaattgtcagagggagagtggctgcggaggaagaagactttag

SEQ ID NO: 475 - DNA, 348 bp, Arabidopsis thaliana
ctcaggaacttctatactttggttatggtggatccagatgttccaagtcctagcaaccctcacctccgagaatatctccattggttggtgactgatatccctgctacaactggaacaacctttggcaatgagattgtgtgttacgaaaatccaagtcccactgcaggaattcatcgtgtcgtgtttatattgtttcgacagcttggcaggcaaacagtgtatgcaccagggtggcgccagaacttcaacactcgcgagtttgctgagatctacaatctcggccttcccgtggccgcagttttctacaattgtcagagggagagtggctgcggaggaagaagactttag

SEQ ID NO: 476 - DNA, 510 bp, Arabidopsis thaliana
gaccctcttatagtaagcagagttgttggagacgttcttgatccgtttaatagatcaatcactctaaaggttacttatggccaaagagaggtgactaatggcttggatctaaggccttctcaggttcaaaacaagccaagagttgagattggtggagaagacctcaggaacttctatactttggttatggtggatccagatgttccaagtcctagcaaccctcacctccgagaatatctccattggttggtgactgatatccctgctacaactggaacaacctttggcaatgagattgtgtgttacgaaaatccaagtcccactgcaggaattcatcgtgtcgtgtttatattgtttcgacagcttggcaggcaaacagtgtatgcaccagggtggcgccagaacttcaacactcgcgagtttgctgagatctacaatctcggccttcccgtggccgcagttttctacaattgtcagagggagagtggctgcggaggaagaagactttag

SEQ ID NO: 477 - DNA, 507 bp, Arabidopsis thaliana
cctcttatagtaagcagagttgttggagacgttcttgatccgtttaatagatcaatcactctaaaggttacttatggccaaagagaggtgactaatggcttggatctaaggccttctcaggttcaaaacaagccaagagttgagattggtggagaagacctcaggaacttctatactttggttatggtggatccagatgttccaagtcctagcaaccctcacctccgagaatatctccattggttggtgactgatatccctgctacaactggaacaacctttggcaatgagattgtgtgttacgaaaatccaagtcccactgcaggaattcatcgtgtcgtgtttatattgtttcgacagcttggcaggcaaacagtgtatgcaccagggtggcgccagaacttcaacactcgcgagtttgctgagatctacaatctcggccttcccgtggccgcagttttctacaattgtcagagggagagtggctgcggaggaagaagactttag

SEQ ID NO: 478 - DNA, 504 bp, Arabidopsis thaliana
cttatagtaagcagagttgttggagacgttcttgatccgtttaatagatcaatcactctaaaggttacttatggccaaagagaggtgactaatggcttggatctaaggccttctcaggttcaaaacaagccaagagttgagattggtggagaagacctcaggaacttctatactttggttatggtggatccagatgttccaagtcctagcaaccctcacctccgagaatatctccattggttggtgactgatatccctgctacaactggaacaacctttggcaatgagattgtgtgttacgaaaatccaagtcccactgcaggaattcatcgtgtcgtgtttatattgtttcgacagcttggcaggcaaacagtgtatgcaccagggtggcgccagaacttcaacactcgcgagtttgctgagatctacaatctcggccttcccgtggccgcagttttctacaattgtcagagggagagtggctgcggaggaagaagactttag

SEQ ID NO: 479 - DNA, 231 bp, Arabidopsis thaliana
acctttggcaatgagattgtgtgttacgaaaatccaagtcccactgcaggaattcatcgtgtcgtgtttatattgtttcgacagcttggcaggcaaacagtgtatgcaccagggtggcgccagaacttcaacactcgcgagtttgctgagatctacaatctcggccttcccgtggccgcagttttctacaattgtcagagggagagtggctgcggaggaagaagactttag

SEQ ID NO: 480 - DNA, 501 bp, Arabidopsis thaliana
atagtaagcagagttgttggagacgttcttgatccgtttaatagatcaatcactctaaaggttacttatggccaaagagaggtgactaatggcttggatctaaggccttctcaggttcaaaacaagccaagagttgagattggtggagaagacctcaggaacttctatactttggttatggtggatccagatgttccaagtcctagcaaccctcacctccgagaatatctccattggttggtgactgatatccctgctacaactggaacaacctttggcaatgagattgtgtgttacgaaaatccaagtcccactgcaggaattcatcgtgtcgtgtttatattgtttcgacagcttggcaggcaaacagtgtatgcaccagggtggcgccagaacttcaacactcgcgagtttgctgagatctacaatctcggccttcccgtggccgcagttttctacaattgtcagagggagagtggctgcggaggaagaagactttag

SEQ ID NO: 481 - protein, 175 aa, Arabidopsis thaliana; identical to SEQ ID NO: 231

SEQ ID NO: 482 - protein, 10 aa, Arabidopsis thaliana
MSINIRDPLI

SEQ ID NO: 483 - protein, 115 aa, Arabidopsis thaliana
MSINIRDPLIVSRVVGDVLDPFNRSITLKVTYGQREVTNGLDLRPSQVQNKPRVEIGGEDLRNFYTLVMVDPDVPSPSNPHLREYLHWLVTDIPATTGTTFGNEIVCYENPSPTA

SEQ ID NO: 484 - protein, 11 aa, Arabidopsis thaliana
MSINIRDPLIV

SEQ ID NO: 485 - protein, 12 aa, Arabidopsis thaliana
MSINIRDPLIVS

SEQ ID NO: 486 - protein, 139 aa, Arabidopsis thaliana
MSINIRDPLIVSRVVGDVLDPFNRSITLKVTYGQREVTNGLDLRPSQVQNKPRVEIGGEDLRNFYTLVMVDPDVPSPSNPHLREYLHWLVTDIPATTGTTFGNEIVCYENPSPTAGIHRVVFILFRQLGRQTVYAPGWR

SEQ ID NO: 487 - protein, 13 aa, Arabidopsis thaliana
MSINIRDPLIVSR

SEQ ID NO: 488 - protein, 14 aa, Arabidopsis thaliana
MSINIRDPLIVSRV

SEQ ID NO: 489 - protein, 153 aa, Arabidopsis thaliana
MSINIRDPLIVSRVVGDVLDPFNRSITLKVTYGQREVTNGLDLRPSQVQNKPRVEIGGEDLRNFYTLVMVDPDVPSPSNPHLREYLHWLVTDIPATTGTTFGNEIVCYENPSPTAGIHRVVFILFRQLGRQTVYAPGWRQNFNTREFAEIYNL

SEQ ID NO: 490 - protein, 154 aa, Arabidopsis thaliana
MSINIRDPLIVSRVVGDVLDPFNRSITLKVTYGQREVTNGLDLRPSQVQNKPRVEIGGEDLRNFYTLVMVDPDVPSPSNPHLREYLHWLVTDIPATTGTTFGNEIVCYENPSPTAGIHRVVFILFRQLGRQTVYAPGWRQNFNTREFAEIYNLG

SEQ ID NO: 491 - protein, 155 aa, Arabidopsis thaliana
MSINIRDPLIVSRVVGDVLDPFNRSITLKVTYGQREVTNGLDLRPSQVQNKPRVEIGGEDLRNFYTLVMVDPDVPSPSNPHLREYLHWLVTDIPATTGTTFGNEIVCYENPSPTAGIHRVVFILFRQLGRQTVYAPGWRQNFNTREFAEIYNLGL

SEQ ID NO: 492 - protein, 156 aa, Arabidopsis thaliana
MSINIRDPLIVSRVVGDVLDPFNRSITLKVTYGQREVTNGLDLRPSQVQNKPRVEIGGEDLRNFYTLVMVDPDVPSPSNPHLREYLHWLVTDIPATTGTTFGNEIVCYENPSPTAGIHRVVFILFRQLGRQTVYAPGWRQNFNTREFAEIYNLGLP

SEQ ID NO: 493 - protein, 157 aa, Arabidopsis thaliana
MSINIRDPLIVSRVVGDVLDPFNRSITLKVTYGQREVTNGLDLRPSQVQNKPRVEIGGEDLRNFYTLVMVDPDVPSPSNPHLREYLHWLVTDIPATTGTTFGNEIVCYENPSPTAGIHRVVFILFRQLGRQTVYAPGWRQNFNTREFAEIYNLGLPV

SEQ ID NO: 494 - protein, 158 aa, Arabidopsis thaliana
MSINIRDPLIVSRVVGDVLDPFNRSITLKVTYGQREVTNGLDLRPSQVQNKPRVEIGGEDLRNFYTLVMVDPDVPSPSNPHLREYLHWLVTDIPATTGTTFGNEIVCYENPSPTAGIHRVVFILFRQLGRQTVYAPGWRQNFNTREFAEIYNLGLPVA

SEQ ID NO: 495 - protein, 159 aa, Arabidopsis thaliana
MSINIRDPLIVSRVVGDVLDPFNRSITLKVTYGQREVTNGLDLRPSQVQNKPRVEIGGEDLRNFYTLVMVDPDVPSPSNPHLREYLHWLVTDIPATTGTTFGNEIVCYENPSPTAGIHRVVFILFRQLGRQTVYAPGWRQNFNTREFAEIYNLGLPVAA

SEQ ID NO: 496 - protein, 15 aa, Arabidopsis thaliana
MSINIRDPLIVSRVV

SEQ ID NO: 497 - protein, 160 aa, Arabidopsis thaliana
MSINIRDPLIVSRVVGDVLDPFNRSITLKVTYGQREVTNGLDLRPSQVQNKPRVEIGGEDLRNFYTLVMVDPDVPSPSNPHLREYLHWLVTDIPATTGTTFGNEIVCYENPSPTAGIHRVVFILFRQLGRQTVYAPGWRQNFNTREFAEIYNLGLPVAAV

SEQ ID NO: 498 - protein, 161 aa, Arabidopsis thaliana
MSINIRDPLIVSRVVGDVLDPFNRSITLKVTYGQREVTNGLDLRPSQVQNKPRVEIGGEDLRNFYTLVMVDPDVPSPSNPHLREYLHWLVTDIPATTGTTFGNEIVCYENPSPTAGIHRVVFILFRQLGRQTVYAPGWRQNFNTREFAEIYNLGLPVAAVF

SEQ ID NO: 499 - protein, 162 aa, Arabidopsis thaliana
MSINIRDPLIVSRVVGDVLDPFNRSITLKVTYGQREVTNGLDLRPSQVQNKPRVEIGGEDLRNFYTLVMVDPDVPSPSNPHLREYLHWLVTDIPATTGTTFGNEIVCYENPSPTAGIHRVVFILFRQLGRQTVYAPGWRQNFNTREFAEIYNLGLPVAAVFY

SEQ ID NO: 500 - protein, 163 aa, Arabidopsis thaliana
MSINIRDPLIVSRVVGDVLDPFNRSITLKVTYGQREVTNGLDLRPSQVQNKPRVEIGGEDLRNFYTLVMVDPDVPSPSNPHLREYLHWLVTDIPATTGTTFGNEIVCYENPSPTAGIHRVVFILFRQLGRQTVYAPGWRQNFNTREFAEIYNLGLPVAAVFYN

SEQ ID NO: 501 - protein, 164 aa, Arabidopsis thaliana
MSINIRDPLIVSRVVGDVLDPFNRSITLKVTYGQREVTNGLDLRPSQVQNKPRVEIGGEDLRNFYTLVMVDPDVPSPSNPHLREYLHWLVTDIPATTGTTFGNEIVCYENPSPTAGIHRVVFILFRQLGRQTVYAPGWRQNFNTREFAEIYNLGLPVAAVFYNC

SEQ ID NO: 502 - protein, 165 aa, Arabidopsis thaliana
MSINIRDPLIVSRVVGDVLDPFNRSITLKVTYGQREVTNGLDLRPSQVQNKPRVEIGGEDLRNFYTLVMVDPDVPSPSNPHLREYLHWLVTDIPATTGTTFGNEIVCYENPSPTAGIHRVVFILFRQLGRQTVYAPGWRQNFNTREFAEIYNLGLPVAAVFYNCQ

SEQ ID NO: 503 - protein, 166 aa, Arabidopsis thaliana
MSINIRDPLIVSRVVGDVLDPFNRSITLKVTYGQREVTNGLDLRPSQVQNKPRVEIGGEDLRNFYTLVMVDPDVPSPSNPHLREYLHWLVTDIPATTGTTFGNEIVCYENPSPTAGIHRVVFILFRQLGRQTVYAPGWRQNFNTREFAEIYNLGLPVAAVFYNCQR

SEQ ID NO: 504 - protein, 167 aa, Arabidopsis thaliana
MSINIRDPLIVSRVVGDVLDPFNRSITLKVTYGQREVTNGLDLRPSQVQNKPRVEIGGEDLRNFYTLVMVDPDVPSPSNPHLREYLHWLVTDIPATTGTTFGNEIVCYENPSPTAGIHRVVFILFRQLGRQTVYAPGWRQNFNTREFAEIYNLGLPVAAVFYNCQRE

SEQ ID NO: 505 - protein, 168 aa, Arabidopsis thaliana
MSINIRDPLIVSRVVGDVLDPFNRSITLKVTYGQREVTNGLDLRPSQVQNKPRVEIGGEDLRNFYTLVMVDPDVPSPSNPHLREYLHWLVTDIPATTGTTFGNEIVCYENPSPTAGIHRVVFILFRQLGRQTVYAPGWRQNFNTREFAEIYNLGLPVAAVFYNCQRES

SEQ ID NO: 506 - protein, 169 aa, Arabidopsis thaliana
MSINIRDPLIVSRVVGDVLDPFNRSITLKVTYGQREVTNGLDLRPSQVQNKPRVEIGGEDLRNFYTLVMVDPDVPSPSNPHLREYLHWLVTDIPATTGTTFGNEIVCYENPSPTAGIHRVVFILFRQLGRQTVYAPGWRQNFNTREFAEIYNLGLPVAAVFYNCQRESG

SEQ ID NO: 507 - protein, 16 aa, Arabidopsis thaliana
MSINIRDPLIVSRVVG

SEQ ID NO: 508 - protein, 170 aa, Arabidopsis thaliana
MSINIRDPLIVSRVVGDVLDPFNRSITLKVTYGQREVTNGLDLRPSQVQNKPRVEIGGEDLRNFYTLVMVDPDVPSPSNPHLREYLHWLVTDIPATTGTTFGNEIVCYENPSPTAGIHRVVFILFRQLGRQTVYAPGWRQNFNTREFAEIYNLGLPVAAVFYNCQRESGC

SEQ ID NO: 509 - protein, 171 aa, Arabidopsis thaliana
MSINIRDPLIVSRVVGDVLDPFNRSITLKVTYGQREVTNGLDLRPSQVQNKPRVEIGGEDLRNFYTLVMVDPDVPSPSNPHLREYLHWLVTDIPATTGTTFGNEIVCYENPSPTAGIHRVVFILFRQLGRQTVYAPGWRQNFNTREFAEIYNLGLPVAAVFYNCQRESGCG

SEQ ID NO: 510 - protein, 172 aa, Arabidopsis thaliana
MSINIRDPLIVSRVVGDVLDPFNRSITLKVTYGQREVTNGLDLRPSQVQNKPRVEIGGEDLRNFYTLVMVDPDVPSPSNPHLREYLHWLVTDIPATTGTTFGNEIVCYENPSPTAGIHRVVFILFRQLGRQTVYAPGWRQNFNTREFAEIYNLGLPVAAVFYNCQRESGCGG

SEQ ID NO: 511 - protein, 173 aa, Arabidopsis thaliana
MSINIRDPLIVSRVVGDVLDPFNRSITLKVTYGQREVTNGLDLRPSQVQNKPRVEIGGEDLRNFYTLVMVDPDVPSPSNPHLREYLHWLVTDIPATTGTTFGNEIVCYENPSPTAGIHRVVFILFRQLGRQTVYAPGWRQNFNTREFAEIYNLGLPVAAVFYNCQRESGCGGR

SEQ ID NO: 512 - protein, 174 aa, Arabidopsis thaliana
MSINIRDPLIVSRVVGDVLDPFNRSITLKVTYGQREVTNGLDLRPSQVQNKPRVEIGGEDLRNFYTLVMVDPDVPSPSNPHLREYLHWLVTDIPATTGTTFGNEIVCYENPSPTAGIHRVVFILFRQLGRQTVYAPGWRQNFNTREFAEIYNLGLPVAAVFYNCQRESGCGGRR

SEQ ID NO: 513 - protein, 17 aa, Arabidopsis thaliana
MSINIRDPLIVSRVVGD

SEQ ID NO: 514 - protein, 18 aa, Arabidopsis thaliana
MSINIRDPLIVSRVVGDV

SEQ ID NO: 515 - protein, 19 aa, Arabidopsis thaliana
MSINIRDPLIVSRVVGDVL

SEQ ID NO: 516 - protein, 20 aa, Arabidopsis thaliana
MSINIRDPLIVSRVVGDVLD

SEQ ID NO: 517 - protein, 21 aa, Arabidopsis thaliana
MSINIRDPLIVSRVVGDVLDP

SEQ ID NO: 518 - protein, 22 aa, Arabidopsis thaliana
MSINIRDPLIVSRVVGDVLDPF

SEQ ID NO: 519 - protein, 23 aa, Arabidopsis thaliana
MSINIRDPLIVSRVVGDVLDPFN

SEQ ID NO: 520 - protein, 24 aa, Arabidopsis thaliana
MSINIRDPLIVSRVVGDVLDPFNR

SEQ ID NO: 521 - protein, 25 aa, Arabidopsis thaliana
MSINIRDPLIVSRVVGDVLDPFNRS

SEQ ID NO: 522 - protein, 26 aa, Arabidopsis thaliana
MSINIRDPLIVSRVVGDVLDPFNRSI

SEQ ID NO: 523 - protein, 27 aa, Arabidopsis thaliana
MSINIRDPLIVSRVVGDVLDPFNRSIT

SEQ ID NO: 524 - protein, 6 aa, Arabidopsis thaliana
MSINIR

SEQ ID NO: 525 - protein, 7 aa, Arabidopsis thaliana
MSINIRD

SEQ ID NO: 526 - protein, 89 aa, Arabidopsis thaliana
MSINIRDPLIVSRVVGDVLDPFNRSITLKVTYGQREVTNGLDLRPSQVQNKPRVEIGGEDLRNFYTLVMVDPDVPSPSNPHLREYLHWL

SEQ ID NO: 527 - protein, 8 aa, Arabidopsis thaliana
MSINIRDP

SEQ ID NO: 528 - protein, 9 aa, Arabidopsis thaliana
MSINIRDPL

SEQ ID NO: 529 - protein, 165 aa, Arabidopsis thaliana
VSRVVGDVLDPFNRSITLKVTYGQREVTNGLDLRPSQVQNKPRVEIGGEDLRNFYTLVMVDPDVPSPSNPHLREYLHWLVTDIPATTGTTFGNEIVCYENPSPTAGIHRVVFILFRQLGRQTVYAPGWRQNFNTREFAEIYNLGLPVAAVFYNCQRESGCGGRRL

SEQ ID NO: 530 - protein, 164 aa, Arabidopsis thaliana
SRVVGDVLDPFNRSITLKVTYGQREVTNGLDLRPSQVQNKPRVEIGGEDLRNFYTLVMVDPDVPSPSNPHLREYLHWLVTDIPATTGTTFGNEIVCYENPSPTAGIHRVVFILFRQLGRQTVYAPGWRQNFNTREFAEIYNLGLPVAAVFYNCQRESGCGGRRL

SEQ ID NO: 531 - protein, 163 aa, Arabidopsis thaliana
RVVGDVLDPFNRSITLKVTYGQREVTNGLDLRPSQVQNKPRVEIGGEDLRNFYTLVMVDPDVPSPSNPHLREYLHWLVTDIPATTGTTFGNEIVCYENPSPTAGIHRVVFILFRQLGRQTVYAPGWRQNFNTREFAEIYNLGLPVAAVFYNCQRESGCGGRRL

SEQ ID NO: 532 - protein, 162 aa, Arabidopsis thaliana
VVGDVLDPFNRSITLKVTYGQREVTNGLDLRPSQVQNKPRVEIGGEDLRNFYTLVMVDPDVPSPSNPHLREYLHWLVTDIPATTGTTFGNEIVCYENPSPTAGIHRVVFILFRQLGRQTVYAPGWRQNFNTREFAEIYNLGLPVAAVFYNCQRESGCGGRRL

SEQ ID NO: 533 - protein, 161 aa, Arabidopsis thaliana
VGDVLDPFNRSITLKVTYGQREVTNGLDLRPSQVQNKPRVEIGGEDLRNFYTLVMVDPDVPSPSNPHLREYLHWLVTDIPATTGTTFGNEIVCYENPSPTAGIHRVVFILFRQLGRQTVYAPGWRQNFNTREFAEIYNLGLPVAAVFYNCQRESGCGGRRL

SEQ ID NO: 534 - protein, 160 aa, Arabidopsis thaliana
GDVLDPFNRSITLKVTYGQREVTNGLDLRPSQVQNKPRVEIGGEDLRNFYTLVMVDPDVPSPSNPHLREYLHWLVTDIPATTGTTFGNEIVCYENPSPTAGIHRVVFILFRQLGRQTVYAPGWRQNFNTREFAEIYNLGLPVAAVFYNCQRESGCGGRRL

SEQ ID NO: 535 - protein, 159 aa, Arabidopsis thaliana
DVLDPFNRSITLKVTYGQREVTNGLDLRPSQVQNKPRVEIGGEDLRNFYTLVMVDPDVPSPSNPHLREYLHWLVTDIPATTGTTFGNEIVCYENPSPTAGIHRVVFILFRQLGRQTVYAPGWRQNFNTREFAEIYNLGLPVAAVFYNCQRESGCGGRRL

SEQ ID NO: 536 - protein, 158 aa, Arabidopsis thaliana
VLDPFNRSITLKVTYGQREVTNGLDLRPSQVQNKPRVEIGGEDLRNFYTLVMVDPDVPSPSNPHLREYLHWLVTDIPATTGTTFGNEIVCYENPSPTAGIHRVVFILFRQLGRQTVYAPGWRQNFNTREFAEIYNLGLPVAAVFYNCQRESGCGGRRL

SEQ ID NO: 537 - protein, 157 aa, Arabidopsis thaliana
LDPFNRSITLKVTYGQREVTNGLDLRPSQVQNKPRVEIGGEDLRNFYTLVMVDPDVPSPSNPHLREYLHWLVTDIPATTGTTFGNEIVCYENPSPTAGIHRVVFILFRQLGRQTVYAPGWRQNFNTREFAEIYNLGLPVAAVFYNCQRESGCGGRRL

SEQ ID NO: 538 - protein, 156 aa, Arabidopsis thaliana
DPFNRSITLKVTYGQREVTNGLDLRPSQVQNKPRVEIGGEDLRNFYTLVMVDPDVPSPSNPHLREYLHWLVTDIPATTGTTFGNEIVCYENPSPTAGIHRVVFILFRQLGRQTVYAPGWRQNFNTREFAEIYNLGLPVAAVFYNCQRESGCGGRRL

SEQ ID NO: 539 - protein, 174 aa, Arabidopsis thaliana
SINIRDPLIVSRVVGDVLDPFNRSITLKVTYGQREVTNGLDLRPSQVQNKPRVEIGGEDLRNFYTLVMVDPDVPSPSNPHLREYLHWLVTDIPATTGTTFGNEIVCYENPSPTAGIHRVVFILFRQLGRQTVYAPGWRQNFNTREFAEIYNLGLPVAAVFYNCQRESGCGGRRL

SEQ ID NO: 540 - protein, 155 aa, Arabidopsis thaliana
PFNRSITLKVTYGQREVTNGLDLRPSQVQNKPRVEIGGEDLRNFYTLVMVDPDVPSPSNPHLREYLHWLVTDIPATTGTTFGNEIVCYENPSPTAGIHRVVFILFRQLGRQTVYAPGWRQNFNTREFAEIYNLGLPVAAVFYNCQRESGCGGRRL

SEQ ID NO: 541 - protein, 154 aa, Arabidopsis thaliana
FNRSITLKVTYGQREVTNGLDLRPSQVQNKPRVEIGGEDLRNFYTLVMVDPDVPSPSNPHLREYLHWLVTDIPATTGTTFGNEIVCYENPSPTAGIHRVVFILFRQLGRQTVYAPGWRQNFNTREFAEIYNLGLPVAAVFYNCQRESGCGGRRL

SEQ ID NO: 542 - protein, 153 aa, Arabidopsis thaliana
NRSITLKVTYGQREVTNGLDLRPSQVQNKPRVEIGGEDLRNFYTLVMVDPDVPSPSNPHLREYLHWLVTDIPATTGTTFGNEIVCYENPSPTAGIHRVVFILFRQLGRQTVYAPGWRQNFNTREFAEIYNLGLPVAAVFYNCQRESGCGGRRL

SEQ ID NO: 543 - protein, 152 aa, Arabidopsis thaliana
RSITLKVTYGQREVTNGLDLRPSQVQNKPRVEIGGEDLRNFYTLVMVDPDVPSPSNPHLREYLHWLVTDIPATTGTTFGNEIVCYENPSPTAGIHRVVFILFRQLGRQTVYAPGWRQNFNTREFAEIYNLGLPVAAVFYNCQRESGCGGRRL

SEQ ID NO: 544 - protein, 151 aa, Arabidopsis thaliana
SITLKVTYGQREVTNGLDLRPSQVQNKPRVEIGGEDLRNFYTLVMVDPDVPSPSNPHLREYLHWLVTDIPATTGTTFGNEIVCYENPSPTAGIHRVVFILFRQLGRQTVYAPGWRQNFNTREFAEIYNLGLPVAAVFYNCQRESGCGGRRL

SEQ ID NO: 545 - protein, 150 aa, Arabidopsis thaliana
ITLKVTYGQREVTNGLDLRPSQVQNKPRVEIGGEDLRNFYTLVMVDPDVPSPSNPHLREYLHWLVTDIPATTGTTFGNEIVCYENPSPTAGIHRVVFILFRQLGRQTVYAPGWRQNFNTREFAEIYNLGLPVAAVFYNCQRESGCGGRRL

SEQ ID NO: 546 - protein, 149 aa, Arabidopsis thaliana
TLKVTYGQREVTNGLDLRPSQVQNKPRVEIGGEDLRNFYTLVMVDPDVPSPSNPHLREYLHWLVTDIPATTGTTFGNEIVCYENPSPTAGIHRVVFILFRQLGRQTVYAPGWRQNFNTREFAEIYNLGLPVAAVFYNCQRESGCGGRRL

SEQ ID NO: 547 - protein, 148 aa, Arabidopsis thaliana
LKVTYGQREVTNGLDLRPSQVQNKPRVEIGGEDLRNFYTLVMVDPDVPSPSNPHLREYLHWLVTDIPATTGTTFGNEIVCYENPSPTAGIHRVVFILFRQLGRQTVYAPGWRQNFNTREFAEIYNLGLPVAAVFYNCQRESGCGGRRL

SEQ ID NO: 548 - protein, 147 aa, Arabidopsis thaliana
KVTYGQREVTNGLDLRPSQVQNKPRVEIGGEDLRNFYTLVMVDPDVPSPSNPHLREYLHWLVTDIPATTGTTFGNEIVCYENPSPTAGIHRVVFILFRQLGRQTVYAPGWRQNFNTREFAEIYNLGLPVAAVFYNCQRESGCGGRRL

SEQ ID NO: 549 - protein, 146 aa, Arabidopsis thaliana
VTYGQREVTNGLDLRPSQVQNKPRVEIGGEDLRNFYTLVMVDPDVPSPSNPHLREYLHWLVTDIPATTGTTFGNEIVCYENPSPTAGIHRVVFILFRQLGRQTVYAPGWRQNFNTREFAEIYNLGLPVAAVFYNCQRESGCGGRRL

SEQ ID NO: 550 - protein, 137 aa, Arabidopsis thaliana
NGLDLRPSQVQNKPRVEIGGEDLRNFYTLVMVDPDVPSPSNPHLREYLHWLVTDIPATTGTTFGNEIVCYENPSPTAGIHRVVFILFRQLGRQTVYAPGWRQNFNTREFAEIYNLGLPVAAVFYNCQRESGCGGRRL

SEQ ID NO: 551 - protein, 126 aa, Arabidopsis thaliana
NKPRVEIGGEDLRNFYTLVMVDPDVPSPSNPHLREYLHWLVTDIPATTGTTFGNEIVCYENPSPTAGIHRVVFILFRQLGRQTVYAPGWRQNFNTREFAEIYNLGLPVAAVFYNCQRESGCGGRRL

SEQ ID NO: 552 - protein, 170 aa, Arabidopsis thaliana
RDPLIVSRVVGDVLDPFNRSITLKVTYGQREVTNGLDLRPSQVQNKPRVEIGGEDLRNFYTLVMVDPDVPSPSNPHLREYLHWLVTDIPATTGTTFGNEIVCYENPSPTAGIHRVVFILFRQLGRQTVYAPGWRQNFNTREFAEIYNLGLPVAAVFYNCQRESGCGGRRL

SEQ ID NO: 553 - protein, 115 aa, Arabidopsis thaliana
LRNFYTLVMVDPDVPSPSNPHLREYLHWLVTDIPATTGTTFGNEIVCYENPSPTAGIHRVVFILFRQLGRQTVYAPGWRQNFNTREFAEIYNLGLPVAAVFYNCQRESGCGGRRL

SEQ ID NO: 554 - protein, 169 aa, Arabidopsis thaliana
DPLIVSRVVGDVLDPFNRSITLKVTYGQREVTNGLDLRPSQVQNKPRVEIGGEDLRNFYTLVMVDPDVPSPSNPHLREYLHWLVTDIPATTGTTFGNEIVCYENPSPTAGIHRVVFILFRQLGRQTVYAPGWRQNFNTREFAEIYNLGLPVAAVFYNCQRESGCGGRRL

SEQ ID NO: 555 - protein, 168 aa, Arabidopsis thaliana
PLIVSRVVGDVLDPFNRSITLKVTYGQREVTNGLDLRPSQVQNKPRVEIGGEDLRNFYTLVMVDPDVPSPSNPHLREYLHWLVTDIPATTGTTFGNEIVCYENPSPTAGIHRVVFILFRQLGRQTVYAPGWRQNFNTREFAEIYNLGLPVAAVFYNCQRESGCGGRRL

SEQ ID NO: 556 - protein, 167 aa, Arabidopsis thaliana
LIVSRVVGDVLDPFNRSITLKVTYGQREVTNGLDLRPSQVQNKPRVEIGGEDLRNFYTLVMVDPDVPSPSNPHLREYLHWLVTDIPATTGTTFGNEIVCYENPSPTAGIHRVVFILFRQLGRQTVYAPGWRQNFNTREFAEIYNLGLPVAAVFYNCQRESGCGGRRL

SEQ ID NO: 557 - protein, 76 aa, Arabidopsis thaliana
TFGNEIVCYENPSPTAGIHRVVFILFRQLGRQTVYAPGWRQNFNTREFAEIYNLGLPVAAVFYNCQRESGCGGRRL

SEQ ID NO: 558 - protein, 166 aa, Arabidopsis thaliana
IVSRVVGDVLDPFNRSITLKVTYGQREVTNGLDLRPSQVQNKPRVEIGGEDLRNFYTLVMVDPDVPSPSNPHLREYLHWLVTDIPATTGTTFGNEIVCYENPSPTAGIHRVVFILFRQLGRQTVYAPGWRQNFNTREFAEIYNLGLPVAAVFYNCQRESGCGGRRL

SEQ ID NO: 559 - DNA, 543 bp, Cucurbita maxima
atgccgagaaatcgtgaccctctagtcgtcgggagagtgatcggcgacgtcgtcgactcgttctcgaggtccatctcgattagggttgtttacgactcgagggaagttaacaatgggtgtgagctcaaaccctctcaagctgtcaacaagccaagagttgagattggtggcactgaccttcgcaccttcttcactttggttatggtggatcccgacgctcctagccctagcgatcccaatctaagagaatacttgcattggttagtgaccgatattccagctacaaccgaggcaacctttggacaagagatagtgtgctacgagaatccaagaccaacggtgggtatccaccgttttgtgctggtcttgttccggcagctcggaaggcaaacggtgtatgctcctgggtggcgccagaacttcaacaccagacactttgcagagctttacaatcttggttcgccagtcgccgccgtctatttcaattgccaaagggaaaatggctccggtggaaggagaagagccggcgatgaatgttcataa

SEQ ID NO: 560 - DNA, 306 bp, Cucurbita maxima
atgccgagaaatcgtgaccctctagtcgtcgggagagtgatcggcgacgtcgtcgactcgttctcgaggtccatctcgattagggttgtttacgactcgagggaagttaacaatgggtgtgagctcaaaccctctcaagctgtcaacaagccaagagttgagattggtggcactgaccttcgcaccttcttcactttggttatggtggatcccgacgctcctagccctagcgatcccaatctaagagaatacttgcattggttagtgaccgatattccagctacaaccgaggcaacctttggacaa

SEQ ID NO: 561 - DNA, 30 bp, Cucurbita maxima
atgccgagaaatcgtgaccctctagtcgtc

SEQ ID NO: 562 - DNA, 33 bp, Cucurbita maxima
atgccgagaaatcgtgaccctctagtcgtcggg

SEQ ID NO: 563 - DNA, 36 bp, Cucurbita maxima
atgccgagaaatcgtgaccctctagtcgtcgggaga

SEQ ID NO: 564 - DNA, 408 bp, Cucurbita maxima
atgccgagaaatcgtgaccctctagtcgtcgggagagtgatcggcgacgtcgtcgactcgttctcgaggtccatctcgattagggttgtttacgactcgagggaagttaacaatgggtgtgagctcaaaccctctcaagctgtcaacaagccaagagttgagattggtggcactgaccttcgcaccttcttcactttggttatggtggatcccgacgctcctagccctagcgatcccaatctaagagaatacttgcattggttagtgaccgatattccagctacaaccgaggcaacctttggacaagagatagtgtgctacgagaatccaagaccaacggtgggtatccaccgttttgtgctggtcttgttccggcagctcggaaggcaaacggtgtatgctcctggg

SEQ ID NO: 565 - DNA, 39 bp, Cucurbita maxima
atgccgagaaatcgtgaccctctagtcgtcgggagagtg

SEQ ID NO: 566 - DNA, 42 bp, Cucurbita maxima
atgccgagaaatcgtgaccctctagtcgtcgggagagtgatc

SEQ ID NO: 567 - DNA, 450 bp, Cucurbita maxima
atgccgagaaatcgtgaccctctagtcgtcgggagagtgatcggcgacgtcgtcgactcgttctcgaggtccatctcgattagggttgtttacgactcgagggaagttaacaatgggtgtgagctcaaaccctctcaagctgtcaacaagccaagagttgagattggtggcactgaccttcgcaccttcttcactttggttatggtggatcccgacgctcctagccctagcgatcccaatctaagagaatacttgcattggttagtgaccgatattccagctacaaccgaggcaacctttggacaagagatagtgtgctacgagaatccaagaccaacggtgggtatccaccgttttgtgctggtcttgttccggcagctcggaaggcaaacggtgtatgctcctgggtggcgccagaacttcaacaccagacactttgcagagctttac

SEQ ID NO: 568 - DNA, 453 bp, Cucurbita maxima
atgccgagaaatcgtgaccctctagtcgtcgggagagtgatcggcgacgtcgtcgactcgttctcgaggtccatctcgattagggttgtttacgactcgagggaagttaacaatgggtgtgagctcaaaccctctcaagctgtcaacaagccaagagttgagattggtggcactgaccttcgcaccttcttcactttggttatggtggatcccgacgctcctagccctagcgatcccaatctaagagaatacttgcattggttagtgaccgatattccagctacaaccgaggcaacctttggacaagagatagtgtgctacgagaatccaagaccaacggtgggtatccaccgttttgtgctggtcttgttccggcagctcggaaggcaaacggtgtatgctcctgggtggcgccagaacttcaacaccagacactttgcagagctttacaat

SEQ ID NO: 569 - DNA, 456 bp, Cucurbita maxima
atgccgagaaatcgtgaccctctagtcgtcgggagagtgatcggcgacgtcgtcgactcgttctcgaggtccatctcgattagggttgtttacgactcgagggaagttaacaatgggtgtgagctcaaaccctctcaagctgtcaacaagccaagagttgagattggtggcactgaccttcgcaccttcttcactttggttatggtggatcccgacgctcctagccctagcgatcccaatctaagagaatacttgcattggttagtgaccgatattccagctacaaccgaggcaacctttggacaagagatagtgtgctacgagaatccaagaccaacggtgggtatccaccgttttgtgctggtcttgttccggcagctcggaaggcaaacggtgtatgctcctgggtggcgccagaacttcaacaccagacactttgcagagctttacaatctt

SEQ ID NO: 570 - DNA, 459 bp, Cucurbita maxima
atgccgagaaatcgtgaccctctagtcgtcgggagagtgatcggcgacgtcgtcgactcgttctcgaggtccatctcgattagggttgtttacgactcgagggaagttaacaatgggtgtgagctcaaaccctctcaagctgtcaacaagccaagagttgagattggtggcactgaccttcgcaccttcttcactttggttatggtggatcccgacgctcctagccctagcgatcccaatctaagagaatacttgcattggttagtgaccgatattccagctacaaccgaggcaacctttggacaagagatagtgtgctacgagaatccaagaccaacggtgggtatccaccgttttgtgctggtcttgttccggcagctcggaaggcaaacggtgtatgctcctgggtggcgccagaacttcaacaccagacactttgcagagctttacaatcttggt

SEQ ID NO: 571 - DNA, 462 bp, Cucurbita maxima
atgccgagaaatcgtgaccctctagtcgtcgggagagtgatcggcgacgtcgtcgactcgttctcgaggtccatctcgattagggttgtttacgactcgagggaagttaacaatgggtgtgagctcaaaccctctcaagctgtcaacaagccaagagttgagattggtggcactgaccttcgcaccttcttcactttggttatggtggatcccgacgctcctagccctagcgatcccaatctaagagaatacttgcattggttagtgaccgatattccagctacaaccgaggcaacctttggacaagagatagtgtgctacgagaatccaagaccaacggtgggtatccaccgttttgtgctggtcttgttccggcagctcggaaggcaaacggtgtatgctcctgggtggcgccagaacttcaacaccagacactttgcagagctttacaatcttggttcg

SEQ ID NO: 572 - DNA, 465 bp, Cucurbita maxima
atgccgagaaatcgtgaccctctagtcgtcgggagagtgatcggcgacgtcgtcgactcgttctcgaggtccatctcgattagggttgtttacgactcgagggaagttaacaatgggtgtgagctcaaaccctctcaagctgtcaacaagccaagagttgagattggtggcactgaccttcgcaccttcttcactttggttatggtggatcccgacgctcctagccctagcgatcccaatctaagagaatacttgcattggttagtgaccgatattccagctacaaccgaggcaacctttggacaagagatagtgtgctacgagaatccaagaccaacggtgggtatccaccgttttgtgctggtcttgttccggcagctcggaaggcaaacggtgtatgctcctgggtggcgccagaacttcaacaccagacactttgcagagctttacaatcttggttcgcca

SEQ ID NO: 573 - DNA, 468 bp, Cucurbita maxima
atgccgagaaatcgtgaccctctagtcgtcgggagagtgatcggcgacgtcgtcgactcgttctcgaggtccatctcgattagggttgtttacgactcgagggaagttaacaatgggtgtgagctcaaaccctctcaagctgtcaacaagccaagagttgagattggtggcactgaccttcgcaccttcttcactttggttatggtggatcccgacgctcctagccctagcgatcccaatctaagagaatacttgcattggttagtgaccgatattccagctacaaccgaggcaacctttggacaagagatagtgtgctacgagaatccaagaccaacggtgggtatccaccgttttgtgctggtcttgttccggcagctcggaaggcaaacggtgtatgctcctgggtggcgccagaacttcaacaccagacactttgcagagctttacaatcttggttcgccagtc

SEQ ID NO: 574 - DNA, 471 bp, Cucurbita maxima
atgccgagaaatcgtgaccctctagtcgtcgggagagtgatcggcgacgtcgtcgactcgttctcgaggtccatctcgattagggttgtttacgactcgagggaagttaacaatgggtgtgagctcaaaccctctcaagctgtcaacaagccaagagttgagattggtggcactgaccttcgcaccttcttcactttggttatggtggatcccgacgctcctagccctagcgatcccaatctaagagaatacttgcattggttagtgaccgatattccagctacaaccgaggcaacctttggacaagagatagtgtgctacgagaatccaagaccaacggtgggtatccaccgttttgtgctggtcttgttccggcagctcggaaggcaaacggtgtatgctcctgggtggcgccagaacttcaacaccagacactttgcagagctttacaatcttggttcgccagtcgcc

SEQ ID NO: 575 - DNA, 474 bp, Cucurbita maxima
atgccgagaaatcgtgaccctctagtcgtcgggagagtgatcggcgacgtcgtcgactcgttctcgaggtccatctcgattagggttgtttacgactcgagggaagttaacaatgggtgtgagctcaaaccctctcaagctgtcaacaagccaagagttgagattggtggcactgaccttcgcaccttcttcactttggttatggtggatcccgacgctcctagccctagcgatcccaatctaagagaatacttgcattggttagtgaccgatattccagctacaaccgaggcaacctttggacaagagatagtgtgctacgagaatccaagaccaacggtgggtatccaccgttttgtgctggtcttgttccggcagctcggaaggcaaacggtgtatgctcctgggtggcgccagaacttcaacaccagacactttgcagagctttacaatcttggttcgccagtcgccgcc

SEQ ID NO: 576 - DNA, 477 bp, Cucurbita maxima
atgccgagaaatcgtgaccctctagtcgtcgggagagtgatcggcgacgtcgtcgactcgttctcgaggtccatctcgattagggttgtttacgactcgagggaagttaacaatgggtgtgagctcaaaccctctcaagctgtcaacaagccaagagttgagattggtggcactgaccttcgcaccttcttcactttggttatggtggatcccgacgctcctagccctagcgatcccaatctaagagaatacttgcattggttagtgaccgatattccagctacaaccgaggcaacctttggacaagagatagtgtgctacgagaatccaagaccaacggtgggtatccaccgttttgtgctggtcttgttccggcagctcggaaggcaaacggtgtatgctcctgggtggcgccagaacttcaacaccagacactttgcagagctttacaatcttggttcgccagtcgccgccgtc

SEQ ID NO: 577 - DNA, 45 bp, Cucurbita maxima
atgccgagaaatcgtgaccctctagtcgtcgggagagtgatcggc

SEQ ID NO: 578 - DNA, 480 bp, Cucurbita maxima
atgccgagaaatcgtgaccctctagtcgtcgggagagtgatcggcgacgtcgtcgactcgttctcgaggtccatctcgattagggttgtttacgactcgagggaagttaacaatgggtgtgagctcaaaccctctcaagctgtcaacaagccaagagttgagattggtggcactgaccttcgcaccttcttcactttggttatggtggatcccgacgctcctagccctagcgatcccaatctaagagaatacttgcattggttagtgaccgatattccagctacaaccgaggcaacctttggacaagagatagtgtgctacgagaatccaagaccaacggtgggtatccaccgttttgtgctggtcttgttccggcagctcggaaggcaaacggtgtatgctcctgggtggcgccagaacttcaacaccagacactttgcagagctttacaatcttggttcgccagtcgccgccgtctat

SEQ ID NO: 579 - DNA, 483 bp, Cucurbita maxima
atgccgagaaatcgtgaccctctagtcgtcgggagagtgatcggcgacgtcgtcgactcgttctcgaggtccatctcgattagggttgtttacgactcgagggaagttaacaatgggtgtgagctcaaaccctctcaagctgtcaacaagccaagagttgagattggtggcactgaccttcgcaccttcttcactttggttatggtggatcccgacgctcctagccctagcgatcccaatctaagagaatacttgcattggttagtgaccgatattccagctacaaccgaggcaacctttggacaagagatagtgtgctacgagaatccaagaccaacggtgggtatccaccgttttgtgctggtcttgttccggcagctcggaaggcaaacggtgtatgctcctgggtggcgccagaacttcaacaccagacactttgcagagctttacaatcttggttcgccagtcgccgccgtctatttc

SEQ ID NO: 580 - DNA, 486 bp, Cucurbita maxima
atgccgagaaatcgtgaccctctagtcgtcgggagagtgatcggcgacgtcgtcgactcgttctcgaggtccatctcgattagggttgtttacgactcgagggaagttaacaatgggtgtgagctcaaaccctctcaagctgtcaacaagccaagagttgagattggtggcactgaccttcgcaccttcttcactttggttatggtggatcccgacgctcctagccctagcgatcccaatctaagagaatacttgcattggttagtgaccgatattccagctacaaccgaggcaacctttggacaagagatagtgtgctacgagaatccaagaccaacggtgggtatccaccgttttgtgctggtcttgttccggcagctcggaaggcaaacggtgtatgctcctgggtggcgccagaacttcaacaccagacactttgcagagctttacaatcttggttcgccagtcgccgccgtctatttcaat

SEQ ID NO: 581 - DNA, 489 bp, Cucurbita maxima
atgccgagaaatcgtgaccctctagtcgtcgggagagtgatcggcgacgtcgtcgactcgttctcgaggtccatctcgattagggttgtttacgactcgagggaagttaacaatgggtgtgagctcaaaccctctcaagctgtcaacaagccaagagttgagattggtggcactgaccttcgcaccttcttcactttggttatggtggatcccgacgctcctagccctagcgatcccaatctaagagaatacttgcattggttagtgaccgatattccagctacaaccgaggcaacctttggacaagagatagtgtgctacgagaatccaagaccaacggtgggtatccaccgttttgtgctggtcttgttccggcagctcggaaggcaaacggtgtatgctcctgggtggcgccagaacttcaacaccagacactttgcagagctttacaatcttggttcgccagtcgccgccgtctatttcaattgc

SEQ ID NO: 582 - DNA, 492 bp, Cucurbita maxima
atgccgagaaatcgtgaccctctagtcgtcgggagagtgatcggcgacgtcgtcgactcgttctcgaggtccatctcgattagggttgtttacgactcgagggaagttaacaatgggtgtgagctcaaaccctctcaagctgtcaacaagccaagagttgagattggtggcactgaccttcgcaccttcttcactttggttatggtggatcccgacgctcctagccctagcgatcccaatctaagagaatacttgcattggttagtgaccgatattccagctacaaccgaggcaacctttggacaagagatagtgtgctacgagaatccaagaccaacggtgggtatccaccgttttgtgctggtcttgttccggcagctcggaaggcaaacggtgtatgctcctgggtggcgccagaacttcaacaccagacactttgcagagctttacaatcttggttcgccagtcgccgccgtctatttcaattgccaa

SEQ ID NO: 583 - DNA, 495 bp, Cucurbita maxima
atgccgagaaatcgtgaccctctagtcgtcgggagagtgatcggcgacgtcgtcgactcgttctcgaggtccatctcgattagggttgtttacgactcgagggaagttaacaatgggtgtgagctcaaaccctctcaagctgtcaacaagccaagagttgagattggtggcactgaccttcgcaccttcttcactttggttatggtggatcccgacgctcctagccctagcgatcccaatctaagagaatacttgcattggttagtgaccgatattccagctacaaccgaggcaacctttggacaagagatagtgtgctacgagaatccaagaccaacggtgggtatccaccgttttgtgctggtcttgttccggcagctcggaaggcaaacggtgtatgctcctgggtggcgccagaacttcaacaccagacactttgcagagctttacaatcttggttcgccagtcgccgccgtctatttcaattgccaaagg

SEQ ID NO: 584 - DNA, 498 bp, Cucurbita maxima
atgccgagaaatcgtgaccctctagtcgtcgggagagtgatcggcgacgtcgtcgactcgttctcgaggtccatctcgattagggttgtttacgactcgagggaagttaacaatgggtgtgagctcaaaccctctcaagctgtcaacaagccaagagttgagattggtggcactgaccttcgcaccttcttcactttggttatggtggatcccgacgctcctagccctagcgatcccaatctaagagaatacttgcattggttagtgaccgatattccagctacaaccgaggcaacctttggacaagagatagtgtgctacgagaatccaagaccaacggtgggtatccaccgttttgtgctggtcttgttccggcagctcggaaggcaaacggtgtatgctcctgggtggcgccagaacttcaacaccagacactttgcagagctttacaatcttggttcgccagtcgccgccgtctatttcaattgccaaagggaa

SEQ ID NO: 585 - DNA, 501 bp, Cucurbita maxima
atgccgagaaatcgtgaccctctagtcgtcgggagagtgatcggcgacgtcgtcgactcgttctcgaggtccatctcgattagggttgtttacgactcgagggaagttaacaatgggtgtgagctcaaaccctctcaagctgtcaacaagccaagagttgagattggtggcactgaccttcgcaccttcttcactttggttatggtggatcccgacgctcctagccctagcgatcccaatctaagagaatacttgcattggttagtgaccgatattccagctacaaccgaggcaacctttggacaagagatagtgtgctacgagaatccaagaccaacggtgggtatccaccgttttgtgctggtcttgttccggcagctcggaaggcaaacggtgtatgctcctgggtggcgccagaacttcaacaccagacactttgcagagctttacaatcttggttcgccagtcgccgccgtctatttcaattgccaaagggaaaat

SEQ ID NO: 586 - DNA, 504 bp, Cucurbita maxima
atgccgagaaatcgtgaccctctagtcgtcgggagagtgatcggcgacgtcgtcgactcgttctcgaggtccatctcgattagggttgtttacgactcgagggaagttaacaatgggtgtgagctcaaaccctctcaagctgtcaacaagccaagagttgagattggtggcactgaccttcgcaccttcttcactttggttatggtggatcccgacgctcctagccctagcgatcccaatctaagagaatacttgcattggttagtgaccgatattccagctacaaccgaggcaacctttggacaagagatagtgtgctacgagaatccaagaccaacggtgggtatccaccgttttgtgctggtcttgttccggcagctcggaaggcaaacggtgtatgctcctgggtggcgccagaacttcaacaccagacactttgcagagctttacaatcttggttcgccagtcgccgccgtctatttcaattgccaaagggaaaatggc

SEQ ID NO: 587 - DNA, 507 bp, Cucurbita maxima
atgccgagaaatcgtgaccctctagtcgtcgggagagtgatcggcgacgtcgtcgactcgttctcgaggtccatctcgattagggttgtttacgactcgagggaagttaacaatgggtgtgagctcaaaccctctcaagctgtcaacaagccaagagttgagattggtggcactgaccttcgcaccttcttcactttggttatggtggatcccgacgctcctagccctagcgatcccaatctaagagaatacttgcattggttagtgaccgatattccagctacaaccgaggcaacctttggacaagagatagtgtgctacgagaatccaagaccaacggtgggtatccaccgttttgtgctggtcttgttccggcagctcggaaggcaaacggtgtatgctcctgggtggcgccagaacttcaacaccagacactttgcagagctttacaatcttggttcgccagtcgccgccgtctatttcaattgccaaagggaaaatggctcc

SEQ ID NO: 588 - DNA, 48 bp, Cucurbita maxima
atgccgagaaatcgtgaccctctagtcgtcgggagagtgatcggcgac

SEQ ID NO: 589 - DNA, 510 bp, Cucurbita maxima
atgccgagaaatcgtgaccctctagtcgtcgggagagtgatcggcgacgtcgtcgactcgttctcgaggtccatctcgattagggttgtttacgactcgagggaagttaacaatgggtgtgagctcaaaccctctcaagctgtcaacaagccaagagttgagattggtggcactgaccttcgcaccttcttcactttggttatggtggatcccgacgctcctagccctagcgatcccaatctaagagaatacttgcattggttagtgaccgatattccagctacaaccgaggcaacctttggacaagagatagtgtgctacgagaatccaagaccaacggtgggtatccaccgttttgtgctggtcttgttccggcagctcggaaggcaaacggtgtatgctcctgggtggcgccagaacttcaacaccagacactttgcagagctttacaatcttggttcgccagtcgccgccgtctatttcaattgccaaagggaaaatggctccggt

SEQ ID NO: 590 - DNA, 513 bp, Cucurbita maxima
atgccgagaaatcgtgaccctctagtcgtcgggagagtgatcggcgacgtcgtcgactcgttctcgaggtccatctcgattagggttgtttacgactcgagggaagttaacaatgggtgtgagctcaaaccctctcaagctgtcaacaagccaagagttgagattggtggcactgaccttcgcaccttcttcactttggttatggtggatcccgacgctcctagccctagcgatcccaatctaagagaatacttgcattggttagtgaccgatattccagctacaaccgaggcaacctttggacaagagatagtgtgctacgagaatccaagaccaacggtgggtatccaccgttttgtgctggtcttgttccggcagctcggaaggcaaacggtgtatgctcctgggtggcgccagaacttcaacaccagacactttgcagagctttacaatcttggttcgccagtcgccgccgtctatttcaattgccaaagggaaaatggctccggtgga

SEQ ID NO: 591 - DNA, 51 bp, Cucurbita maxima
atgccgagaaatcgtgaccctctagtcgtcgggagagtgatcggcgacgtc

SEQ ID NO: 592 - DNA, 54 bp, Cucurbita maxima
atgccgagaaatcgtgaccctctagtcgtcgggagagtgatcggcgacgtcgtc

SEQ ID NO: 593 - DNA, 57 bp, Cucurbita maxima
atgccgagaaatcgtgaccctctagtcgtcgggagagtgatcggcgacgtcgtcgac

SEQ ID NO: 594 - DNA, 60 bp, Cucurbita maxima
atgccgagaaatcgtgaccctctagtcgtcgggagagtgatcggcgacgtcgtcgactcg

SEQ ID NO: 595 - DNA, 63 bp, Cucurbita maxima
atgccgagaaatcgtgaccctctagtcgtcgggagagtgatcggcgacgtcgtcgactcgttc

SEQ ID NO: 596 - DNA, 66 bp, Cucurbita maxima
atgccgagaaatcgtgaccctctagtcgtcgggagagtgatcggcgacgtcgtcgactcgttctcg

SEQ ID NO: 597 - DNA, 69 bp, Cucurbita maxima
atgccgagaaatcgtgaccctctagtcgtcgggagagtgatcggcgacgtcgtcgactcgttctcgagg

SEQ ID NO: 598 - DNA, 72 bp, Cucurbita maxima
atgccgagaaatcgtgaccctctagtcgtcgggagagtgatcggcgacgtcgtcgactcgttctcgaggtcc

SEQ ID NO: 599 - DNA, 9 bp, Cucurbita maxima
atgccgaga

SEQ ID NO: 600 - DNA, 12 bp, Cucurbita maxima
atgccgagaaat

SEQ ID NO: 601 - DNA, 15 bp, Cucurbita maxima
atgccgagaaatcgt

SEQ ID NO: 602 - DNA, 18 bp, Cucurbita maxima
atgccgagaaatcgtgac

SEQ ID NO: 603 - DNA, 21 bp, Cucurbita maxima
atgccgagaaatcgtgaccct

SEQ ID NO: 604 - DNA, 258 bp, Cucurbita maxima
atgccgagaaatcgtgaccctctagtcgtcgggagagtgatcggcgacgtcgtcgactcgttctcgaggtccatctcgattagggttgtttacgactcgagggaagttaacaatgggtgtgagctcaaaccctctcaagctgtcaacaagccaagagttgagattggtggcactgaccttcgcaccttcttcactttggttatggtggatcccgacgctcctagccctagcgatcccaatctaagagaatacttgcat

SEQ ID NO: 605 - DNA, 24 bp, Cucurbita maxima
atgccgagaaatcgtgaccctcta

SEQ ID NO: 606 - DNA, 27 bp, Cucurbita maxima
atgccgagaaatcgtgaccctctagtc

SEQ ID NO: 607 - DNA, 513 bp, Cucurbita maxima
gggagagtgatcggcgacgtcgtcgactcgttctcgaggtccatctcgattagggttgtttacgactcgagggaagttaacaatgggtgtgagctcaaaccctctcaagctgtcaacaagccaagagttgagattggtggcactgaccttcgcaccttcttcactttggttatggtggatcccgacgctcctagccctagcgatcccaatctaagagaatacttgcattggttagtgaccgatattccagctacaaccgaggcaacctttggacaagagatagtgtgctacgagaatccaagaccaacggtgggtatccaccgttttgtgctggtcttgttccggcagctcggaaggcaaacggtgtatgctcctgggtggcgccagaacttcaacaccagacactttgcagagctttacaatcttggttcgccagtcgccgccgtctatttcaattgccaaagggaaaatggctccggtggaaggagaagagccggcgatgaatgttcataa

SEQ ID NO: 608 - DNA, 510 bp, Cucurbita maxima
agagtgatcggcgacgtcgtcgactcgttctcgaggtccatctcgattagggttgtttacgactcgagggaagttaacaatgggtgtgagctcaaaccctctcaagctgtcaacaagccaagagttgagattggtggcactgaccttcgcaccttcttcactttggttatggtggatcccgacgctcctagccctagcgatcccaatctaagagaatacttgcattggttagtgaccgatattccagctacaaccgaggcaacctttggacaagagatagtgtgctacgagaatccaagaccaacggtgggtatccaccgttttgtgctggtcttgttccggcagctcggaaggcaaacggtgtatgctcctgggtggcgccagaacttcaacaccagacactttgcagagctttacaatcttggttcgccagtcgccgccgtctatttcaattgccaaagggaaaatggctccggtggaaggagaagagccggcgatgaatgttcataa

SEQ ID NO: 609 - DNA, 507 bp, Cucurbita maxima
gtgatcggcgacgtcgtcgactcgttctcgaggtccatctcgattagggttgtttacgactcgagggaagttaacaatgggtgtgagctcaaaccctctcaagctgtcaacaagccaagagttgagattggtggcactgaccttcgcaccttcttcactttggttatggtggatcccgacgctcctagccctagcgatcccaatctaagagaatacttgcattggttagtgaccgatattccagctacaaccgaggcaacctttggacaagagatagtgtgctacgagaatccaagaccaacggtgggtatccaccgttttgtgctggtcttgttccggcagctcggaaggcaaacggtgtatgctcctgggtggcgccagaacttcaacaccagacactttgcagagctttacaatcttggttcgccagtcgccgccgtctatttcaattgccaaagggaaaatggctccggtggaaggagaagagccggcgatgaatgttcataa

SEQ ID NO: 610 - DNA, 504 bp, Cucurbita maxima
atcggcgacgtcgtcgactcgttctcgaggtccatctcgattagggttgtttacgactcgagggaagttaacaatgggtgtgagctcaaaccctctcaagctgtcaacaagccaagagttgagattggtggcactgaccttcgcaccttcttcactttggttatggtggatcccgacgctcctagccctagcgatcccaatctaagagaatacttgcattggttagtgaccgatattccagctacaaccgaggcaacctttggacaagagatagtgtgctacgagaatccaagaccaacggtgggtatccaccgttttgtgctggtcttgttccggcagctcggaaggcaaacggtgtatgctcctgggtggcgccagaacttcaacaccagacactttgcagagctttacaatcttggttcgccagtcgccgccgtctatttcaattgccaaagggaaaatggctccggtggaaggagaagagccggcgatgaatgttcataa

SEQ ID NO: 611 - DNA, 501 bp, Cucurbita maxima
ggcgacgtcgtcgactcgttctcgaggtccatctcgattagggttgtttacgactcgagggaagttaacaatgggtgtgagctcaaaccctctcaagctgtcaacaagccaagagttgagattggtggcactgaccttcgcaccttcttcactttggttatggtggatcccgacgctcctagccctagcgatcccaatctaagagaatacttgcattggttagtgaccgatattccagctacaaccgaggcaacctttggacaagagatagtgtgctacgagaatccaagaccaacggtgggtatccaccgttttgtgctggtcttgttccggcagctcggaaggcaaacggtgtatgctcctgggtggcgccagaacttcaacaccagacactttgcagagctttacaatcttggttcgccagtcgccgccgtctatttcaattgccaaagggaaaatggctccggtggaaggagaagagccggcgatgaatgttcataa

SEQ ID NO: 612 - DNA, 498 bp, Cucurbita maxima
gacgtcgtcgactcgttctcgaggtccatctcgattagggttgtttacgactcgagggaagttaacaatgggtgtgagctcaaaccctctcaagctgtcaacaagccaagagttgagattggtggcactgaccttcgcaccttcttcactttggttatggtggatcccgacgctcctagccctagcgatcccaatctaagagaatacttgcattggttagtgaccgatattccagctacaaccgaggcaacctttggacaagagatagtgtgctacgagaatccaagaccaacggtgggtatccaccgttttgtgctggtcttgttccggcagctcggaaggcaaacggtgtatgctcctgggtggcgccagaacttcaacaccagacactttgcagagctttacaatcttggttcgccagtcgccgccgtctatttcaattgccaaagggaaaatggctccggtggaaggagaagagccggcgatgaatgttcataa

SEQ ID NO: 613 - DNA, 495 bp, Cucurbita maxima
gtcgtcgactcgttctcgaggtccatctcgattagggttgtttacgactcgagggaagttaacaatgggtgtgagctcaaaccctctcaagctgtcaacaagccaagagttgagattggtggcactgaccttcgcaccttcttcactttggttatggtggatcccgacgctcctagccctagcgatcccaatctaagagaatacttgcattggttagtgaccgatattccagctacaaccgaggcaacctttggacaagagatagtgtgctacgagaatccaagaccaacggtgggtatccaccgttttgtgctggtcttgttccggcagctcggaaggcaaacggtgtatgctcctgggtggcgccagaacttcaacaccagacactttgcagagctttacaatcttggttcgccagtcgccgccgtctatttcaattgccaaagggaaaatggctccggtggaaggagaagagccggcgatgaatgttcataa

SEQ ID NO: 614 - DNA, 492 bp, Cucurbita maxima
gtcgactcgttctcgaggtccatctcgattagggttgtttacgactcgagggaagttaacaatgggtgtgagctcaaaccctctcaagctgtcaacaagccaagagttgagattggtggcactgaccttcgcaccttcttcactttggttatggtggatcccgacgctcctagccctagcgatcccaatctaagagaatacttgcattggttagtgaccgatattccagctacaaccgaggcaacctttggacaagagatagtgtgctacgagaatccaagaccaacggtgggtatccaccgttttgtgctggtcttgttccggcagctcggaaggcaaacggtgtatgctcctgggtggcgccagaacttcaacaccagacactttgcagagctttacaatcttggttcgccagtcgccgccgtctatttcaattgccaaagggaaaatggctccggtggaaggagaagagccggcgatgaatgttcataa

SEQ ID NO: 615 - DNA, 489 bp, Cucurbita maxima
gactcgttctcgaggtccatctcgattagggttgtttacgactcgagggaagttaacaatgggtgtgagctcaaaccctctcaagctgtcaacaagccaagagttgagattggtggcactgaccttcgcaccttcttcactttggttatggtggatcccgacgctcctagccctagcgatcccaatctaagagaatacttgcattggttagtgaccgatattccagctacaaccgaggcaacctttggacaagagatagtgtgctacgagaatccaagaccaacggtgggtatccaccgttttgtgctggtcttgttccggcagctcggaaggcaaacggtgtatgctcctgggtggcgccagaacttcaacaccagacactttgcagagctttacaatcttggttcgccagtcgccgccgtctatttcaattgccaaagggaaaatggctccggtggaaggagaagagccggcgatgaatgttcataa

SEQ ID NO: 616 - DNA, 486 bp, Cucurbita maxima
tcgttctcgaggtccatctcgattagggttgtttacgactcgagggaagttaacaatgggtgtgagctcaaaccctctcaagctgtcaacaagccaagagttgagattggtggcactgaccttcgcaccttcttcactttggttatggtggatcccgacgctcctagccctagcgatcccaatctaagagaatacttgcattggttagtgaccgatattccagctacaaccgaggcaacctttggacaagagatagtgtgctacgagaatccaagaccaacggtgggtatccaccgttttgtgctggtcttgttccggcagctcggaaggcaaacggtgtatgctcctgggtggcgccagaacttcaacaccagacactttgcagagctttacaatcttggttcgccagtcgccgccgtctatttcaattgccaaagggaaaatggctccggtggaaggagaagagccggcgatgaatgttcataa

SEQ ID NO: 617 - DNA, 540 bp, Cucurbita maxima
ccgagaaatcgtgaccctctagtcgtcgggagagtgatcggcgacgtcgtcgactcgttctcgaggtccatctcgattagggttgtttacgactcgagggaagttaacaatgggtgtgagctcaaaccctctcaagctgtcaacaagccaagagttgagattggtggcactgaccttcgcaccttcttcactttggttatggtggatcccgacgctcctagccctagcgatcccaatctaagagaatacttgcattggttagtgaccgatattccagctacaaccgaggcaacctttggacaagagatagtgtgctacgagaatccaagaccaacggtgggtatccaccgttttgtgctggtcttgttccggcagctcggaaggcaaacggtgtatgctcctgggtggcgccagaacttcaacaccagacactttgcagagctttacaatcttggttcgccagtcgccgccgtctatttcaattgccaaagggaaaatggctccggtggaaggagaagagccggcgatgaatgttcataa

SEQ ID NO: 618 - DNA, 483 bp, Cucurbita maxima
ttctcgaggtccatctcgattagggttgtttacgactcgagggaagttaacaatgggtgtgagctcaaaccctctcaagctgtcaacaagccaagagttgagattggtggcactgaccttcgcaccttcttcactttggttatggtggatcccgacgctcctagccctagcgatcccaatctaagagaatacttgcattggttagtgaccgatattccagctacaaccgaggcaacctttggacaagagatagtgtgctacgagaatccaagaccaacggtgggtatccaccgttttgtgctggtcttgttccggcagctcggaaggcaaacggtgtatgctcctgggtggcgccagaacttcaacaccagacactttgcagagctttacaatcttggttcgccagtcgccgccgtctatttcaattgccaaagggaaaatggctccggtggaaggagaagagccggcgatgaatgttcataa

SEQ ID NO: 619 - DNA, 480 bp, Cucurbita maxima
tcgaggtccatctcgattagggttgtttacgactcgagggaagttaacaatgggtgtgagctcaaaccctctcaagctgtcaacaagccaagagttgagattggtggcactgaccttcgcaccttcttcactttggttatggtggatcccgacgctcctagccctagcgatcccaatctaagagaatacttgcattggttagtgaccgatattccagctacaaccgaggcaacctttggacaagagatagtgtgctacgagaatccaagaccaacggtgggtatccaccgttttgtgctggtcttgttccggcagctcggaaggcaaacggtgtatgctcctgggtggcgccagaacttcaacaccagacactttgcagagctttacaatcttggttcgccagtcgccgccgtctatttcaattgccaaagggaaaatggctccggtggaaggagaagagccggcgatgaatgttcataa

SEQ ID NO: 620 - DNA, 477 bp, Cucurbita maxima
aggtccatctcgattagggttgtttacgactcgagggaagttaacaatgggtgtgagctcaaaccctctcaagctgtcaacaagccaagagttgagattggtggcactgaccttcgcaccttcttcactttggttatggtggatcccgacgctcctagccctagcgatcccaatctaagagaatacttgcattggttagtgaccgatattccagctacaaccgaggcaacctttggacaagagatagtgtgctacgagaatccaagaccaacggtgggtatccaccgttttgtgctggtcttgttccggcagctcggaaggcaaacggtgtatgctcctgggtggcgccagaacttcaacaccagacactttgcagagctttacaatcttggttcgccagtcgccgccgtctatttcaattgccaaagggaaaatggctccggtggaaggagaagagccggcgatgaatgttcataa

SEQ ID NO: 621 - DNA, 474 bp, Cucurbita maxima
tccatctcgattagggttgtttacgactcgagggaagttaacaatgggtgtgagctcaaaccctctcaagctgtcaacaagccaagagttgagattggtggcactgaccttcgcaccttcttcactttggttatggtggatcccgacgctcctagccctagcgatcccaatctaagagaatacttgcattggttagtgaccgatattccagctacaaccgaggcaacctttggacaagagatagtgtgctacgagaatccaagaccaacggtgggtatccaccgttttgtgctggtcttgttccggcagctcggaaggcaaacggtgtatgctcctgggtggcgccagaacttcaacaccagacactttgcagagctttacaatcttggttcgccagtcgccgccgtctatttcaattgccaaagggaaaatggctccggtggaaggagaagagccggcgatgaatgttcataa

SEQ ID NO: 622 - DNA, 471 bp, Cucurbita maxima
atctcgattagggttgtttacgactcgagggaagttaacaatgggtgtgagctcaaaccctctcaagctgtcaacaagccaagagttgagattggtggcactgaccttcgcaccttcttcactttggttatggtggatcccgacgctcctagccctagcgatcccaatctaagagaatacttgcattggttagtgaccgatattccagctacaaccgaggcaacctttggacaagagatagtgtgctacgagaatccaagaccaacggtgggtatccaccgttttgtgctggtcttgttccggcagctcggaaggcaaacggtgtatgctcctgggtggcgccagaacttcaacaccagacactttgcagagctttacaatcttggttcgccagtcgccgccgtctatttcaattgccaaagggaaaatggctccggtggaaggagaagagccggcgatgaatgttcataa

SEQ ID NO: 623 - DNA, 468 bp, Cucurbita maxima
tcgattagggttgtttacgactcgagggaagttaacaatgggtgtgagctcaaaccctctcaagctgtcaacaagccaagagttgagattggtggcactgaccttcgcaccttcttcactttggttatggtggatcccgacgctcctagccctagcgatcccaatctaagagaatacttgcattggttagtgaccgatattccagctacaaccgaggcaacctttggacaagagatagtgtgctacgagaatccaagaccaacggtgggtatccaccgttttgtgctggtcttgttccggcagctcggaaggcaaacggtgtatgctcctgggtggcgccagaacttcaacaccagacactttgcagagctttacaatcttggttcgccagtcgccgccgtctatttcaattgccaaagggaaaatggctccggtggaaggagaagagccggcgatgaatgttcataa

SEQ ID NO: 624 - DNA, 465 bp, Cucurbita maxima
attagggttgtttacgactcgagggaagttaacaatgggtgtgagctcaaaccctctcaagctgtcaacaagccaagagttgagattggtggcactgaccttcgcaccttcttcactttggttatggtggatcccgacgctcctagccctagcgatcccaatctaagagaatacttgcattggttagtgaccgatattccagctacaaccgaggcaacctttggacaagagatagtgtgctacgagaatccaagaccaacggtgggtatccaccgttttgtgctggtcttgttccggcagctcggaaggcaaacggtgtatgctcctgggtggcgccagaacttcaacaccagacactttgcagagctttacaatcttggttcgccagtcgccgccgtctatttcaattgccaaagggaaaatggctccggtggaaggagaagagccggcgatgaatgttcataa

SEQ ID NO: 625 - DNA, 537 bp, Cucurbita maxima
agaaatcgtgaccctctagtcgtcgggagagtgatcggcgacgtcgtcgactcgttctcgaggtccatctcgattagggttgtttacgactcgagggaagttaacaatgggtgtgagctcaaaccctctcaagctgtcaacaagccaagagttgagattggtggcactgaccttcgcaccttcttcactttggttatggtggatcccgacgctcctagccctagcgatcccaatctaagagaatacttgcattggttagtgaccgatattccagctacaaccgaggcaacctttggacaagagatagtgtgctacgagaatccaagaccaacggtgggtatccaccgttttgtgctggtcttgttccggcagctcggaaggcaaacggtgtatgctcctgggtggcgccagaacttcaacaccagacactttgcagagctttacaatcttggttcgccagtcgccgccgtctatttcaattgccaaagggaaaatggctccggtggaaggagaagagccggcgatgaatgttcataa

SEQ ID NO: 626 - DNA, 438 bp, Cucurbita maxima
gttaacaatgggtgtgagctcaaaccctctcaagctgtcaacaagccaagagttgagattggtggcactgaccttcgcaccttcttcactttggttatggtggatcccgacgctcctagccctagcgatcccaatctaagagaatacttgcattggttagtgaccgatattccagctacaaccgaggcaacctttggacaagagatagtgtgctacgagaatccaagaccaacggtgggtatccaccgttttgtgctggtcttgttccggcagctcggaaggcaaacggtgtatgctcctgggtggcgccagaacttcaacaccagacactttgcagagctttacaatcttggttcgccagtcgccgccgtctatttcaattgccaaagggaaaatggctccggtggaaggagaagagccggcgatgaatgttcataa

SEQ ID NO: 627 - DNA, 534 bp, Cucurbita maxima
aatcgtgaccctctagtcgtcgggagagtgatcggcgacgtcgtcgactcgttctcgaggtccatctcgattagggttgtttacgactcgagggaagttaacaatgggtgtgagctcaaaccctctcaagctgtcaacaagccaagagttgagattggtggcactgaccttcgcaccttcttcactttggttatggtggatcccgacgctcctagccctagcgatcccaatctaagagaatacttgcattggttagtgaccgatattccagctacaaccgaggcaacctttggacaagagatagtgtgctacgagaatccaagaccaacggtgggtatccaccgttttgtgctggtcttgttccggcagctcggaaggcaaacggtgtatgctcctgggtggcgccagaacttcaacaccagacactttgcagagctttacaatcttggttcgccagtcgccgccgtctatttcaattgccaaagggaaaatggctccggtggaaggagaagagccggcgatgaatgttcataa

SEQ ID NO: 628 - DNA, 405 bp, Cucurbita maxima
gctgtcaacaagccaagagttgagattggtggcactgaccttcgcaccttcttcactttggttatggtggatcccgacgctcctagccctagcgatcccaatctaagagaatacttgcattggttagtgaccgatattccagctacaaccgaggcaacctttggacaagagatagtgtgctacgagaatccaagaccaacggtgggtatccaccgttttgtgctggtcttgttccggcagctcggaaggcaaacggtgtatgctcctgggtggcgccagaacttcaacaccagacactttgcagagctttacaatcttggttcgccagtcgccgccgtctatttcaattgccaaagggaaaatggctccggtggaaggagaagagccggcgatgaatgttcataa

SEQ ID NO: 629 - DNA, 531 bp, Cucurbita maxima
cgtgaccctctagtcgtcgggagagtgatcggcgacgtcgtcgactcgttctcgaggtccatctcgattagggttgtttacgactcgagggaagttaacaatgggtgtgagctcaaaccctctcaagctgtcaacaagccaagagttgagattggtggcactgaccttcgcaccttcttcactttggttatggtggatcccgacgctcctagccctagcgatcccaatctaagagaatacttgcattggttagtgaccgatattccagctacaaccgaggcaacctttggacaagagatagtgtgctacgagaatccaagaccaacggtgggtatccaccgttttgtgctggtcttgttccggcagctcggaaggcaaacggtgtatgctcctgggtggcgccagaacttcaacaccagacactttgcagagctttacaatcttggttcgccagtcgccgccgtctatttcaattgccaaagggaaaatggctccggtggaaggagaagagccggcgatgaatgttcataa

SEQ ID NO: 630 - DNA, 528 bp, Cucurbita maxima
gaccctctagtcgtcgggagagtgatcggcgacgtcgtcgactcgttctcgaggtccatctcgattagggttgtttacgactcgagggaagttaacaatgggtgtgagctcaaaccctctcaagctgtcaacaagccaagagttgagattggtggcactgaccttcgcaccttcttcactttggttatggtggatcccgacgctcctagccctagcgatcccaatctaagagaatacttgcattggttagtgaccgatattccagctacaaccgaggcaacctttggacaagagatagtgtgctacgagaatccaagaccaacggtgggtatccaccgttttgtgctggtcttgttccggcagctcggaaggcaaacggtgtatgctcctgggtggcgccagaacttcaacaccagacactttgcagagctttacaatcttggttcgccagtcgccgccgtctatttcaattgccaaagggaaaatggctccggtggaaggagaagagccggcgatgaatgttcataa

SEQ ID NO: 631 - DNA, 342 bp, Cucurbita maxima
atggtggatcccgacgctcctagccctagcgatcccaatctaagagaatacttgcattggttagtgaccgatattccagctacaaccgaggcaacctttggacaagagatagtgtgctacgagaatccaagaccaacggtgggtatccaccgttttgtgctggtcttgttccggcagctcggaaggcaaacggtgtatgctcctgggtggcgccagaacttcaacaccagacactttgcagagctttacaatcttggttcgccagtcgccgccgtctatttcaattgccaaagggaaaatggctccggtggaaggagaagagccggcgatgaatgttcataa

SEQ ID NO: 632 - DNA, 525 bp, Cucurbita maxima
cctctagtcgtcgggagagtgatcggcgacgtcgtcgactcgttctcgaggtccatctcgattagggttgtttacgactcgagggaagttaacaatgggtgtgagctcaaaccctctcaagctgtcaacaagccaagagttgagattggtggcactgaccttcgcaccttcttcactttggttatggtggatcccgacgctcctagccctagcgatcccaatctaagagaatacttgcattggttagtgaccgatattccagctacaaccgaggcaacctttggacaagagatagtgtgctacgagaatccaagaccaacggtgggtatccaccgttttgtgctggtcttgttccggcagctcggaaggcaaacggtgtatgctcctgggtggcgccagaacttcaacaccagacactttgcagagctttacaatcttggttcgccagtcgccgccgtctatttcaattgccaaagggaaaatggctccggtggaaggagaagagccggcgatgaatgttcataa

SEQ ID NO: 633 - DNA, 522 bp, Cucurbita maxima
ctagtcgtcgggagagtgatcggcgacgtcgtcgactcgttctcgaggtccatctcgattagggttgtttacgactcgagggaagttaacaatgggtgtgagctcaaaccctctcaagctgtcaacaagccaagagttgagattggtggcactgaccttcgcaccttcttcactttggttatggtggatcccgacgctcctagccctagcgatcccaatctaagagaatacttgcattggttagtgaccgatattccagctacaaccgaggcaacctttggacaagagatagtgtgctacgagaatccaagaccaacggtgggtatccaccgttttgtgctggtcttgttccggcagctcggaaggcaaacggtgtatgctcctgggtggcgccagaacttcaacaccagacactttgcagagctttacaatcttggttcgccagtcgccgccgtctatttcaattgccaaagggaaaatggctccggtggaaggagaagagccggcgatgaatgttcataa

SEQ ID NO: 634 - DNA, 519 bp, Cucurbita maxima
gtcgtcgggagagtgatcggcgacgtcgtcgactcgttctcgaggtccatctcgattagggttgtttacgactcgagggaagttaacaatgggtgtgagctcaaaccctctcaagctgtcaacaagccaagagttgagattggtggcactgaccttcgcaccttcttcactttggttatggtggatcccgacgctcctagccctagcgatcccaatctaagagaatacttgcattggttagtgaccgatattccagctacaaccgaggcaacctttggacaagagatagtgtgctacgagaatccaagaccaacggtgggtatccaccgttttgtgctggtcttgttccggcagctcggaaggcaaacggtgtatgctcctgggtggcgccagaacttcaacaccagacactttgcagagctttacaatcttggttcgccagtcgccgccgtctatttcaattgccaaagggaaaatggctccggtggaaggagaagagccggcgatgaatgttcataa

SEQ ID NO: 635 - DNA, 255 bp, Cucurbita maxima
gaggcaacctttggacaagagatagtgtgctacgagaatccaagaccaacggtgggtatccaccgttttgtgctggtcttgttccggcagctcggaaggcaaacggtgtatgctcctgggtggcgccagaacttcaacaccagacactttgcagagctttacaatcttggttcgccagtcgccgccgtctatttcaattgccaaagggaaaatggctccggtggaaggagaagagccggcgatgaatgttcataa

SEQ ID NO: 636 - DNA, 516 bp, Cucurbita maxima
gtcgggagagtgatcggcgacgtcgtcgactcgttctcgaggtccatctcgattagggttgtttacgactcgagggaagttaacaatgggtgtgagctcaaaccctctcaagctgtcaacaagccaagagttgagattggtggcactgaccttcgcaccttcttcactttggttatggtggatcccgacgctcctagccctagcgatcccaatctaagagaatacttgcattggttagtgaccgatattccagctacaaccgaggcaacctttggacaagagatagtgtgctacgagaatccaagaccaacggtgggtatccaccgttttgtgctggtcttgttccggcagctcggaaggcaaacggtgtatgctcctgggtggcgccagaacttcaacaccagacactttgcagagctttacaatcttggttcgccagtcgccgccgtctatttcaattgccaaagggaaaatggctccggtggaaggagaagagccggcgatgaatgttcataa

SEQ ID NO: 637 - protein, 180 aa, Cucurbita maxima; identical to SEQ ID NO: 165

SEQ ID NO: 638 - protein, 102 aa, Cucurbita maxima
MPRNRDPLVVGRVIGDVVDSFSRSISIRVVYDSREVNNGCELKPSQAVNKPRVEIGGTDLRTFFTLVMVDPDAPSPSDPNLREYLHWLVTDIPATTEATFGQ

SEQ ID NO: 639 - protein, 10 aa, Cucurbita maxima
MPRNRDPLVV

SEQ ID NO: 640 - protein, 11 aa, Cucurbita maxima
MPRNRDPLVVG

SEQ ID NO: 641 - protein, 12 aa, Cucurbita maxima
MPRNRDPLVVGR

SEQ ID NO: 642 - protein, 136 aa, Cucurbita maxima
MPRNRDPLVVGRVIGDVVDSFSRSISIRVVYDSREVNNGCELKPSQAVNKPRVEIGGTDLRTFFTLVMVDPDAPSPSDPNLREYLHWLVTDIPATTEATFGQEIVCYENPRPTVGIHRFVLVLFRQLGRQTVYAPG

SEQ ID NO: 643 - protein, 13 aa, Cucurbita maxima
MPRNRDPLVVGRV

SEQ ID NO: 644 - protein, 14 aa, Cucurbita maxima
MPRNRDPLVVGRVI

SEQ ID NO: 645 - protein, 150 aa, Cucurbita maxima
MPRNRDPLVVGRVIGDVVDSFSRSISIRVVYDSREVNNGCELKPSQAVNKPRVEIGGTDLRTFFTLVMVDPDAPSPSDPNLREYLHWLVTDIPATTEATFGQEIVCYENPRPTVGIHRFVLVLFRQLGRQTVYAPGWRQNFNTRHFAELY

SEQ ID NO: 646 - protein, 151 aa, Cucurbita maxima
MPRNRDPLVVGRVIGDVVDSFSRSISIRVVYDSREVNNGCELKPSQAVNKPRVEIGGTDLRTFFTLVMVDPDAPSPSDPNLREYLHWLVTDIPATTEATFGQEIVCYENPRPTVGIHRFVLVLFRQLGRQTVYAPGWRQNFNTRHFAELYN

SEQ ID NO: 647 - protein, 152 aa, Cucurbita maxima
MPRNRDPLVVGRVIGDVVDSFSRSISIRVVYDSREVNNGCELKPSQAVNKPRVEIGGTDLRTFFTLVMVDPDAPSPSDPNLREYLHWLVTDIPATTEATFGQEIVCYENPRPTVGIHRFVLVLFRQLGRQTVYAPGWRQNFNTRHFAELYNL

SEQ ID NO: 648 - protein, 153 aa, Cucurbita maxima
MPRNRDPLVVGRVIGDVVDSFSRSISIRVVYDSREVNNGCELKPSQAVNKPRVEIGGTDLRTFFTLVMVDPDAPSPSDPNLREYLHWLVTDIPATTEATFGQEIVCYENPRPTVGIHRFVLVLFRQLGRQTVYAPGWRQNFNTRHFAELYNLG

SEQ ID NO: 649 - protein, 154 aa, Cucurbita maxima
MPRNRDPLVVGRVIGDVVDSFSRSISIRVVYDSREVNNGCELKPSQAVNKPRVEIGGTDLRTFFTLVMVDPDAPSPSDPNLREYLHWLVTDIPATTEATFGQEIVCYENPRPTVGIHRFVLVLFRQLGRQTVYAPGWRQNFNTRHFAELYNLGS

SEQ ID NO: 650 - protein, 155 aa, Cucurbita maxima
MPRNRDPLVVGRVIGDVVDSFSRSISIRVVYDSREVNNGCELKPSQAVNKPRVEIGGTDLRTFFTLVMVDPDAPSPSDPNLREYLHWLVTDIPATTEATFGQEIVCYENPRPTVGIHRFVLVLFRQLGRQTVYAPGWRQNFNTRHFAELYNLGSP

SEQ ID NO: 651 - protein, 156 aa, Cucurbita maxima
MPRNRDPLVVGRVIGDVVDSFSRSISIRVVYDSREVNNGCELKPSQAVNKPRVEIGGTDLRTFFTLVMVDPDAPSPSDPNLREYLHWLVTDIPATTEATFGQEIVCYENPRPTVGIHRFVLVLFRQLGRQTVYAPGWRQNFNTRHFAELYNLGSPV

SEQ ID NO: 652 - protein, 157 aa, Cucurbita maxima
MPRNRDPLVVGRVIGDVVDSFSRSISIRVVYDSREVNNGCELKPSQAVNKPRVEIGGTDLRTFFTLVMVDPDAPSPSDPNLREYLHWLVTDIPATTEATFGQEIVCYENPRPTVGIHRFVLVLFRQLGRQTVYAPGWRQNFNTRHFAELYNLGSPVA

SEQ ID NO: 653 - protein, 158 aa, Cucurbita maxima
MPRNRDPLVVGRVIGDVVDSFSRSISIRVVYDSREVNNGCELKPSQAVNKPRVEIGGTDLRTFFTLVMVDPDAPSPSDPNLREYLHWLVTDIPATTEATFGQEIVCYENPRPTVGIHRFVLVLFRQLGRQTVYAPGWRQNFNTRHFAELYNLGSPVAA

SEQ ID NO: 654 - protein, 159 aa, Cucurbita maxima
MPRNRDPLVVGRVIGDVVDSFSRSISIRVVYDSREVNNGCELKPSQAVNKPRVEIGGTDLRTFFTLVMVDPDAPSPSDPNLREYLHWLVTDIPATTEATFGQEIVCYENPRPTVGIHRFVLVLFRQLGRQTVYAPGWRQNFNTRHFAELYNLGSPVAAV

SEQ ID NO: 655 - protein, 15 aa, Cucurbita maxima
MPRNRDPLVVGRVIG

SEQ ID NO: 656 - protein, 160 aa, Cucurbita maxima
MPRNRDPLVVGRVIGDVVDSFSRSISIRVVYDSREVNNGCELKPSQAVNKPRVEIGGTDLRTFFTLVMVDPDAPSPSDPNLREYLHWLVTDIPATTEATFGQEIVCYENPRPTVGIHRFVLVLFRQLGRQTVYAPGWRQNFNTRHFAELYNLGSPVAAVY

SEQ ID NO: 657 - protein, 161 aa, Cucurbita maxima
MPRNRDPLVVGRVIGDVVDSFSRSISIRVVYDSREVNNGCELKPSQAVNKPRVEIGGTDLRTFFTLVMVDPDAPSPSDPNLREYLHWLVTDIPATTEATFGQEIVCYENPRPTVGIHRFVLVLFRQLGRQTVYAPGWRQNFNTRHFAELYNLGSPVAAVYF

SEQ ID NO: 658 - protein, 162 aa, Cucurbita maxima
MPRNRDPLVVGRVIGDVVDSFSRSISIRVVYDSREVNNGCELKPSQAVNKPRVEIGGTDLRTFFTLVMVDPDAPSPSDPNLREYLHWLVTDIPATTEATFGQEIVCYENPRPTVGIHRFVLVLFRQLGRQTVYAPGWRQNFNTRHFAELYNLGSPVAAVYFN

SEQ ID NO: 659 - protein, 163 aa, Cucurbita maxima
MPRNRDPLVVGRVIGDVVDSFSRSISIRVVYDSREVNNGCELKPSQAVNKPRVEIGGTDLRTFFTLVMVDPDAPSPSDPNLREYLHWLVTDIPATTEATFGQEIVCYENPRPTVGIHRFVLVLFRQLGRQTVYAPGWRQNFNTRHFAELYNLGSPVAAVYFNC

SEQ ID NO: 660 - protein, 164 aa, Cucurbita maxima
MPRNRDPLVVGRVIGDVVDSFSRSISIRVVYDSREVNNGCELKPSQAVNKPRVEIGGTDLRTFFTLVMVDPDAPSPSDPNLREYLHWLVTDIPATTEATFGQEIVCYENPRPTVGIHRFVLVLFRQLGRQTVYAPGWRQNFNTRHFAELYNLGSPVAAVYFNCQ

SEQ ID NO: 661 - protein, 165 aa, Cucurbita maxima
MPRNRDPLVVGRVIGDVVDSFSRSISIRVVYDSREVNNGCELKPSQAVNKPRVEIGGTDLRTFFTLVMVDPDAPSPSDPNLREYLHWLVTDIPATTEATFGQEIVCYENPRPTVGIHRFVLVLFRQLGRQTVYAPGWRQNFNTRHFAELYNLGSPVAAVYFNCQR

SEQ ID NO: 662 - protein, 166 aa, Cucurbita maxima
MPRNRDPLVVGRVIGDVVDSFSRSISIRVVYDSREVNNGCELKPSQAVNKPRVEIGGTDLRTFFTLVMVDPDAPSPSDPNLREYLHWLVTDIPATTEATFGQEIVCYENPRPTVGIHRFVLVLFRQLGRQTVYAPGWRQNFNTRHFAELYNLGSPVAAVYFNCQRE

SEQ ID NO: 663 - protein, 167 aa, Cucurbita maxima
MPRNRDPLVVGRVIGDVVDSFSRSISIRVVYDSREVNNGCELKPSQAVNKPRVEIGGTDLRTFFTLVMVDPDAPSPSDPNLREYLHWLVTDIPATTEATFGQEIVCYENPRPTVGIHRFVLVLFRQLGRQTVYAPGWRQNFNTRHFAELYNLGSPVAAVYFNCQREN

SEQ ID NO: 664 - protein, 168 aa, Cucurbita maxima
MPRNRDPLVVGRVIGDVVDSFSRSISIRVVYDSREVNNGCELKPSQAVNKPRVEIGGTDLRTFFTLVMVDPDAPSPSDPNLREYLHWLVTDIPATTEATFGQEIVCYENPRPTVGIHRFVLVLFRQLGRQTVYAPGWRQNFNTRHFAELYNLGSPVAAVYFNCQRENG

SEQ ID NO: 665 - protein, 169 aa, Cucurbita maxima
MPRNRDPLVVGRVIGDVVDSFSRSISIRVVYDSREVNNGCELKPSQAVNKPRVEIGGTDLRTFFTLVMVDPDAPSPSDPNLREYLHWLVTDIPATTEATFGQEIVCYENPRPTVGIHRFVLVLFRQLGRQTVYAPGWRQNFNTRHFAELYNLGSPVAAVYFNCQRENGS

SEQ ID NO: 666 - protein, 16 aa, Cucurbita maxima
MPRNRDPLVVGRVIGD

SEQ ID NO: 667 - protein, 170 aa, Cucurbita maxima
MPRNRDPLVVGRVIGDVVDSFSRSISIRVVYDSREVNNGCELKPSQAVNKPRVEIGGTDLRTFFTLVMVDPDAPSPSDPNLREYLHWLVTDIPATTEATFGQEIVCYENPRPTVGIHRFVLVLFRQLGRQTVYAPGWRQNFNTRHFAELYNLGSPVAAVYFNCQRENGSG

SEQ ID NO: 668 - protein, 171 aa, Cucurbita maxima
MPRNRDPLVVGRVIGDVVDSFSRSISIRVVYDSREVNNGCELKPSQAVNKPRVEIGGTDLRTFFTLVMVDPDAPSPSDPNLREYLHWLVTDIPATTEATFGQEIVCYENPRPTVGIHRFVLVLFRQLGRQTVYAPGWRQNFNTRHFAELYNLGSPVAAVYFNCQRENGSGG

SEQ ID NO: 669 - protein, 17 aa, Cucurbita maxima
MPRNRDPLVVGRVIGDV

SEQ ID NO: 670 - protein, 18 aa, Cucurbita maxima
MPRNRDPLVVGRVIGDVV

SEQ ID NO: 671 - protein, 19 aa, Cucurbita maxima
MPRNRDPLVVGRVIGDVVD

SEQ ID NO: 672 - protein, 20 aa, Cucurbita maxima
MPRNRDPLVVGRVIGDVVDS

SEQ ID NO: 673 - protein, 21 aa, Cucurbita maxima
MPRNRDPLVVGRVIGDVVDSF

SEQ ID NO: 674 - protein, 22 aa, Cucurbita maxima
MPRNRDPLVVGRVIGDVVDSFS

SEQ ID NO: 675 - protein, 23 aa, Cucurbita maxima
MPRNRDPLVVGRVIGDVVDSFSR

SEQ ID NO: 676 - protein, 24 aa, Cucurbita maxima
MPRNRDPLVVGRVIGDVVDSFSRS

SEQ ID NO: 677 - protein, 3 aa, Cucurbita maxima
MPR

SEQ ID NO: 678 - protein, 4 aa, Cucurbita maxima
MPRN

SEQ ID NO: 679 - protein, 5 aa, Cucurbita maxima
MPRNR

SEQ ID NO: 680 - protein, 6 aa, Cucurbita maxima
MPRNRD

SEQ ID NO: 681 - protein, 7 aa, Cucurbita maxima
MPRNRDP

SEQ ID NO: 682 - protein, 86 aa, Cucurbita maxima
MPRNRDPLVVGRVIGDVVDSFSRSISIRVVYDSREVNNGCELKPSQAVNKPRVEIGGTDLRTFFTLVMVDPDAPSPSDPNLREYLH

SEQ ID NO: 683 - protein, 8 aa, Cucurbita maxima
MPRNRDPL

SEQ ID NO: 684 - protein, 9 aa, Cucurbita maxima
MPRNRDPLV

SEQ ID NO: 685 - protein, 170 aa, Cucurbita maxima
GRVIGDVVDSFSRSISIRVVYDSREVNNGCELKPSQAVNKPRVEIGGTDLRTFFTLVMVDPDAPSPSDPNLREYLHWLVTDIPATTEATFGQEIVCYENPRPTVGIHRFVLVLFRQLGRQTVYAPGWRQNFNTRHFAELYNLGSPVAAVYFNCQRENGSGGRRRAGDECS

SEQ ID NO: 686 - protein, 169 aa, Cucurbita maxima
RVIGDVVDSFSRSISIRVVYDSREVNNGCELKPSQAVNKPRVEIGGTDLRTFFTLVMVDPDAPSPSDPNLREYLHWLVTDIPATTEATFGQEIVCYENPRPTVGIHRFVLVLFRQLGRQTVYAPGWRQNFNTRHFAELYNLGSPVAAVYFNCQRENGSGGRRRAGDECS

SEQ ID NO: 687 - protein, 168 aa, Cucurbita maxima
VIGDVVDSFSRSISIRVVYDSREVNNGCELKPSQAVNKPRVEIGGTDLRTFFTLVMVDPDAPSPSDPNLREYLHWLVTDIPATTEATFGQEIVCYENPRPTVGIHRFVLVLFRQLGRQTVYAPGWRQNFNTRHFAELYNLGSPVAAVYFNCQRENGSGGRRRAGDECS

SEQ ID NO: 688 - protein, 167 aa, Cucurbita maxima
IGDVVDSFSRSISIRVVYDSREVNNGCELKPSQAVNKPRVEIGGTDLRTFFTLVMVDPDAPSPSDPNLREYLHWLVTDIPATTEATFGQEIVCYENPRPTVGIHRFVLVLFRQLGRQTVYAPGWRQNFNTRHFAELYNLGSPVAAVYFNCQRENGSGGRRRAGDECS

SEQ ID NO: 689 - protein, 166 aa, Cucurbita maxima
GDVVDSFSRSISIRVVYDSREVNNGCELKPSQAVNKPRVEIGGTDLRTFFTLVMVDPDAPSPSDPNLREYLHWLVTDIPATTEATFGQEIVCYENPRPTVGIHRFVLVLFRQLGRQTVYAPGWRQNFNTRHFAELYNLGSPVAAVYFNCQRENGSGGRRRAGDECS

SEQ ID NO: 690 - protein, 165 aa, Cucurbita maxima
DVVDSFSRSISIRVVYDSREVNNGCELKPSQAVNKPRVEIGGTDLRTFFTLVMVDPDAPSPSDPNLREYLHWLVTDIPATTEATFGQEIVCYENPRPTVGIHRFVLVLFRQLGRQTVYAPGWRQNFNTRHFAELYNLGSPVAAVYFNCQRENGSGGRRRAGDECS

SEQ ID NO: 691 - protein, 164 aa, Cucurbita maxima
VVDSFSRSISIRVVYDSREVNNGCELKPSQAVNKPRVEIGGTDLRTFFTLVMVDPDAPSPSDPNLREYLHWLVTDIPATTEATFGQEIVCYENPRPTVGIHRFVLVLFRQLGRQTVYAPGWRQNFNTRHFAELYNLGSPVAAVYFNCQRENGSGGRRRAGDECS

SEQ ID NO: 692 - protein, 163 aa, Cucurbita maxima
VDSFSRSISIRVVYDSREVNNGCELKPSQAVNKPRVEIGGTDLRTFFTLVMVDPDAPSPSDPNLREYLHWLVTDIPATTEATFGQEIVCYENPRPTVGIHRFVLVLFRQLGRQTVYAPGWRQNFNTRHFAELYNLGSPVAAVYFNCQRENGSGGRRRAGDECS

SEQ ID NO: 693 - protein, 162 aa, Cucurbita maxima
DSFSRSISIRVVYDSREVNNGCELKPSQAVNKPRVEIGGTDLRTFFTLVMVDPDAPSPSDPNLREYLHWLVTDIPATTEATFGQEIVCYENPRPTVGIHRFVLVLFRQLGRQTVYAPGWRQNFNTRHFAELYNLGSPVAAVYFNCQRENGSGGRRRAGDECS

SEQ ID NO: 694 - protein, 161 aa, Cucurbita maxima
SFSRSISIRVVYDSREVNNGCELKPSQAVNKPRVEIGGTDLRTFFTLVMVDPDAPSPSDPNLREYLHWLVTDIPATTEATFGQEIVCYENPRPTVGIHRFVLVLFRQLGRQTVYAPGWRQNFNTRHFAELYNLGSPVAAVYFNCQRENGSGGRRRAGDECS

SEQ ID NO: 695 - protein, 179 aa, Cucurbita maxima
PRNRDPLVVGRVIGDVVDSFSRSISIRVVYDSREVNNGCELKPSQAVNKPRVEIGGTDLRTFFTLVMVDPDAPSPSDPNLREYLHWLVTDIPATTEATFGQEIVCYENPRPTVGIHRFVLVLFRQLGRQTVYAPGWRQNFNTRHFAELYNLGSPVAAVYFNCQRENGSGGRRRAGDECS

SEQ ID NO: 696 - protein, 160 aa, Cucurbita maxima
FSRSISIRVVYDSREVNNGCELKPSQAVNKPRVEIGGTDLRTFFTLVMVDPDAPSPSDPNLREYLHWLVTDIPATTEATFGQEIVCYENPRPTVGIHRFVLVLFRQLGRQTVYAPGWRQNFNTRHFAELYNLGSPVAAVYFNCQRENGSGGRRRAGDECS

SEQ ID NO: 697 - protein, 159 aa, Cucurbita maxima
SRSISIRVVYDSREVNNGCELKPSQAVNKPRVEIGGTDLRTFFTLVMVDPDAPSPSDPNLREYLHWLVTDIPATTEATFGQEIVCYENPRPTVGIHRFVLVLFRQLGRQTVYAPGWRQNFNTRHFAELYNLGSPVAAVYFNCQRENGSGGRRRAGDECS

SEQ ID NO: 698 - protein, 158 aa, Cucurbita maxima
RSISIRVVYDSREVNNGCELKPSQAVNKPRVEIGGTDLRTFFTLVMVDPDAPSPSDPNLREYLHWLVTDIPATTEATFGQEIVCYENPRPTVGIHRFVLVLFRQLGRQTVYAPGWRQNFNTRHFAELYNLGSPVAAVYFNCQRENGSGGRRRAGDECS

SEQ ID NO: 699 - protein, 157 aa, Cucurbita maxima
SISIRVVYDSREVNNGCELKPSQAVNKPRVEIGGTDLRTFFTLVMVDPDAPSPSDPNLREYLHWLVTDIPATTEATFGQEIVCYENPRPTVGIHRFVLVLFRQLGRQTVYAPGWRQNFNTRHFAELYNLGSPVAAVYFNCQRENGSGGRRRAGDECS

SEQ ID NO: 700 - protein, 156 aa, Cucurbita maxima
ISIRVVYDSREVNNGCELKPSQAVNKPRVEIGGTDLRTFFTLVMVDPDAPSPSDPNLREYLHWLVTDIPATTEATFGQEIVCYENPRPTVGIHRFVLVLFRQLGRQTVYAPGWRQNFNTRHFAELYNLGSPVAAVYFNCQRENGSGGRRRAGDECS

SEQ ID NO: 701 - protein, 155 aa, Cucurbita maxima
SIRVVYDSREVNNGCELKPSQAVNKPRVEIGGTDLRTFFTLVMVDPDAPSPSDPNLREYLHWLVTDIPATTEATFGQEIVCYENPRPTVGIHRFVLVLFRQLGRQTVYAPGWRQNFNTRHFAELYNLGSPVAAVYFNCQRENGSGGRRRAGDECS

SEQ ID NO: 702 - protein, 154 aa, Cucurbita maxima
IRVVYDSREVNNGCELKPSQAVNKPRVEIGGTDLRTFFTLVMVDPDAPSPSDPNLREYLHWLVTDIPATTEATFGQEIVCYENPRPTVGIHRFVLVLFRQLGRQTVYAPGWRQNFNTRHFAELYNLGSPVAAVYFNCQRENGSGGRRRAGDECS

SEQ ID NO: 703 - protein, 178 aa, Cucurbita maxima
RNRDPLVVGRVIGDVVDSFSRSISIRVVYDSREVNNGCELKPSQAVNKPRVEIGGTDLRTFFTLVMVDPDAPSPSDPNLREYLHWLVTDIPATTEATFGQEIVCYENPRPTVGIHRFVLVLFRQLGRQTVYAPGWRQNFNTRHFAELYNLGSPVAAVYFNCQRENGSGGRRRAGDECS

SEQ ID NO: 704 - protein, 145 aa, Cucurbita maxima
VNNGCELKPSQAVNKPRVEIGGTDLRTFFTLVMVDPDAPSPSDPNLREYLHWLVTDIPATTEATFGQEIVCYENPRPTVGIHRFVLVLFRQLGRQTVYAPGWRQNFNTRHFAELYNLGSPVAAVYFNCQRENGSGGRRRAGDECS

SEQ ID NO: 705 - protein, 177 aa, Cucurbita maxima
NRDPLVVGRVIGDVVDSFSRSISIRVVYDSREVNNGCELKPSQAVNKPRVEIGGTDLRTFFTLVMVDPDAPSPSDPNLREYLHWLVTDIPATTEATFGQEIVCYENPRPTVGIHRFVLVLFRQLGRQTVYAPGWRQNFNTRHFAELYNLGSPVAAVYFNCQRENGSGGRRRAGDECS

SEQ ID NO: 706 - protein, 134 aa, Cucurbita maxima
AVNKPRVEIGGTDLRTFFTLVMVDPDAPSPSDPNLREYLHWLVTDIPATTEATFGQEIVCYENPRPTVGIHRFVLVLFRQLGRQTVYAPGWRQNFNTRHFAELYNLGSPVAAVYFNCQRENGSGGRRRAGDECS

SEQ ID NO: 707 - protein, 176 aa, Cucurbita maxima
RDPLVVGRVIGDVVDSFSRSISIRVVYDSREVNNGCELKPSQAVNKPRVEIGGTDLRTFFTLVMVDPDAPSPSDPNLREYLHWLVTDIPATTEATFGQEIVCYENPRPTVGIHRFVLVLFRQLGRQTVYAPGWRQNFNTRHFAELYNLGSPVAAVYFNCQRENGSGGRRRAGDECS

SEQ ID NO: 708 - protein, 175 aa, Cucurbita maxima
DPLVVGRVIGDVVDSFSRSISIRVVYDSREVNNGCELKPSQAVNKPRVEIGGTDLRTFFTLVMVDPDAPSPSDPNLREYLHWLVTDIPATTEATFGQEIVCYENPRPTVGIHRFVLVLFRQLGRQTVYAPGWRQNFNTRHFAELYNLGSPVAAVYFNCQRENGSGGRRRAGDECS

SEQ ID NO: 709 - protein, 113 aa, Cucurbita maxima
MVDPDAPSPSDPNLREYLHWLVTDIPATTEATFGQEIVCYENPRPTVGIHRFVLVLFRQLGRQTVYAPGWRQNFNTRHFAELYNLGSPVAAVYFNCQRENGSGGRRRAGDECS

SEQ ID NO: 710 - protein, 174 aa, Cucurbita maxima
PLVVGRVIGDVVDSFSRSISIRVVYDSREVNNGCELKPSQAVNKPRVEIGGTDLRTFFTLVMVDPDAPSPSDPNLREYLHWLVTDIPATTEATFGQEIVCYENPRPTVGIHRFVLVLFRQLGRQTVYAPGWRQNFNTRHFAELYNLGSPVAAVYFNCQRENGSGGRRRAGDECS

SEQ ID NO: 711 - protein, 173 aa, Cucurbita maxima
LVVGRVIGDVVDSFSRSISIRVVYDSREVNNGCELKPSQAVNKPRVEIGGTDLRTFFTLVMVDPDAPSPSDPNLREYLHWLVTDIPATTEATFGQEIVCYENPRPTVGIHRFVLVLFRQLGRQTVYAPGWRQNFNTRHFAELYNLGSPVAAVYFNCQRENGSGGRRRAGDECS

SEQ ID NO: 712 - protein, 172 aa, Cucurbita maxima
VVGRVIGDVVDSFSRSISIRVVYDSREVNNGCELKPSQAVNKPRVEIGGTDLRTFFTLVMVDPDAPSPSDPNLREYLHWLVTDIPATTEATFGQEIVCYENPRPTVGIHRFVLVLFRQLGRQTVYAPGWRQNFNTRHFAELYNLGSPVAAVYFNCQRENGSGGRRRAGDECS

SEQ ID NO: 713 - protein, 84 aa, Cucurbita maxima
EATFGQEIVCYENPRPTVGIHRFVLVLFRQLGRQTVYAPGWRQNFNTRHFAELYNLGSPVAAVYFNCQRENGSGGRRRAGDECS

SEQ ID NO: 714 - protein, 171 aa, Cucurbita maxima
VGRVIGDVVDSFSRSISIRVVYDSREVNNGCELKPSQAVNKPRVEIGGTDLRTFFTLVMVDPDAPSPSDPNLREYLHWLVTDIPATTEATFGQEIVCYENPRPTVGIHRFVLVLFRQLGRQTVYAPGWRQNFNTRHFAELYNLGSPVAAVYFNCQRENGSGGRRRAGDECS

SEQ ID NO: 715 - DNA, 534 bp, Festuca arundinacea
atggctgggagggatagggacccgttggtggttggaagggttgtgggggacgtgctggaccccttcgtccgcaccactaacctcagggtgacattcggaaaccgggccgtgtccaacggctgcgagctcaagccctccatggtcacccaccagcccagggtcgaggtcggcggcaatgagatgaggaccttctacacactcgtgatggtagaccccgacgcgccaagtccaagcgatcccaacctcagagaatacctccattggttggtgacagatattcctggaactactggtgcttccttcgggcaggaggtgatgtgctacgagagccctcgccccaacatgggaatccaccgcttcgtgctcgtactcttccagcagctgggccggcagacggtgtacgcgcccgggtggcgccagaacttcaataccagggacttcgccgagctctacaacctcggcccggccgtcgccgccgtctacttcaactgccagcgcgaggccggctctggcggcaggaggatgtataattga

SEQ ID NO: 716 - DNA, 309 bp, Festuca arundinacea
atggctgggagggatagggacccgttggtggttggaagggttgtgggggacgtgctggaccccttcgtccgcaccactaacctcagggtgacattcggaaaccgggccgtgtccaacggctgcgagctcaagccctccatggtcacccaccagcccagggtcgaggtcggcggcaatgagatgaggaccttctacacactcgtgatggtagaccccgacgcgccaagtccaagcgatcccaacctcagagaatacctccattggttggtgacagatattcctggaactactggtgcttccttcgggcag

SEQ ID NO: 717 - DNA, 30 bp, Festuca arundinacea
atggctgggagggatagggacccgttggtg

SEQ ID NO: 718 - DNA, 33 bp, Festuca arundinacea
atggctgggagggatagggacccgttggtggtt

SEQ ID NO: 719 - DNA, 36 bp, Festuca arundinacea
atggctgggagggatagggacccgttggtggttgga

SEQ ID NO: 720 - DNA, 411 bp, Festuca arundinacea
atggctgggagggatagggacccgttggtggttggaagggttgtgggggacgtgctggaccccttcgtccgcaccactaacctcagggtgacattcggaaaccgggccgtgtccaacggctgcgagctcaagccctccatggtcacccaccagcccagggtcgaggtcggcggcaatgagatgaggaccttctacacactcgtgatggtagaccccgacgcgccaagtccaagcgatcccaacctcagagaatacctccattggttggtgacagatattcctggaactactggtgcttccttcgggcaggaggtgatgtgctacgagagccctcgccccaacatgggaatccaccgcttcgtgctcgtactcttccagcagctgggccggcagacggtgtacgcgcccggg

SEQ ID NO: 721 - DNA, 39 bp, Festuca arundinacea
atggctgggagggatagggacccgttggtggttggaagg

SEQ ID NO: 722 - DNA, 42 bp, Festuca arundinacea
atggctgggagggatagggacccgttggtggttggaagggtt

SEQ ID NO: 723 - DNA, 453 bp, Festuca arundinacea
atggctgggagggatagggacccgttggtggttggaagggttgtgggggacgtgctggaccccttcgtccgcaccactaacctcagggtgacattcggaaaccgggccgtgtccaacggctgcgagctcaagccctccatggtcacccaccagcccagggtcgaggtcggcggcaatgagatgaggaccttctacacactcgtgatggtagaccccgacgcgccaagtccaagcgatcccaacctcagagaatacctccattggttggtgacagatattcctggaactactggtgcttccttcgggcaggaggtgatgtgctacgagagccctcgccccaacatgggaatccaccgcttcgtgctcgtactcttccagcagctgggccggcagacggtgtacgcgcccgggtggcgccagaacttcaataccagggacttcgccgagctctac

SEQ ID NO: 724 - DNA, 456 bp, Festuca arundinacea
atggctgggagggatagggacccgttggtggttggaagggttgtgggggacgtgctggaccccttcgtccgcaccactaacctcagggtgacattcggaaaccgggccgtgtccaacggctgcgagctcaagccctccatggtcacccaccagcccagggtcgaggtcggcggcaatgagatgaggaccttctacacactcgtgatggtagaccccgacgcgccaagtccaagcgatcccaacctcagagaatacctccattggttggtgacagatattcctggaactactggtgcttccttcgggcaggaggtgatgtgctacgagagccctcgccccaacatgggaatccaccgcttcgtgctcgtactcttccagcagctgggccggcagacggtgtacgcgcccgggtggcgccagaacttcaataccagggacttcgccgagctctacaac

SEQ ID NO: 725 - DNA, 459 bp, Festuca arundinacea
atggctgggagggatagggacccgttggtggttggaagggttgtgggggacgtgctggaccccttcgtccgcaccactaacctcagggtgacattcggaaaccgggccgtgtccaacggctgcgagctcaagccctccatggtcacccaccagcccagggtcgaggtcggcggcaatgagatgaggaccttctacacactcgtgatggtagaccccgacgcgccaagtccaagcgatcccaacctcagagaatacctccattggttggtgacagatattcctggaactactggtgcttccttcgggcaggaggtgatgtgctacgagagccctcgccccaacatgggaatccaccgcttcgtgctcgtactcttccagcagctgggccggcagacggtgtacgcgcccgggtggcgccagaacttcaataccagggacttcgccgagctctacaacctc

SEQ ID NO: 726 - DNA, 462 bp, Festuca arundinacea
atggctgggagggatagggacccgttggtggttggaagggttgtgggggacgtgctggaccccttcgtccgcaccactaacctcagggtgacattcggaaaccgggccgtgtccaacggctgcgagctcaagccctccatggtcacccaccagcccagggtcgaggtcggcggcaatgagatgaggaccttctacacactcgtgatggtagaccccgacgcgccaagtccaagcgatcccaacctcagagaatacctccattggttggtgacagatattcctggaactactggtgcttccttcgggcaggaggtgatgtgctacgagagccctcgccccaacatgggaatccaccgcttcgtgctcgtactcttccagcagctgggccggcagacggtgtacgcgcccgggtggcgccagaacttcaataccagggacttcgccgagctctacaacctcggc

SEQ ID NO: 727 - DNA, 465 bp, Festuca arundinacea
atggctgggagggatagggacccgttggtggttggaagggttgtgggggacgtgctggaccccttcgtccgcaccactaacctcagggtgacattcggaaaccgggccgtgtccaacggctgcgagctcaagccctccatggtcacccaccagcccagggtcgaggtcggcggcaatgagatgaggaccttctacacactcgtgatggtagaccccgacgcgccaagtccaagcgatcccaacctcagagaatacctccattggttggtgacagatattcctggaactactggtgcttccttcgggcaggaggtgatgtgctacgagagccctcgccccaacatgggaatccaccgcttcgtgctcgtactcttccagcagctgggccggcagacggtgtacgcgcccgggtggcgccagaacttcaataccagggacttcgccgagctctacaacctcggcccg

SEQ ID NO: 728 - DNA, 468 bp, Festuca arundinacea
atggctgggagggatagggacccgttggtggttggaagggttgtgggggacgtgctggaccccttcgtccgcaccactaacctcagggtgacattcggaaaccgggccgtgtccaacggctgcgagctcaagccctccatggtcacccaccagcccagggtcgaggtcggcggcaatgagatgaggaccttctacacactcgtgatggtagaccccgacgcgccaagtccaagcgatcccaacctcagagaatacctccattggttggtgacagatattcctggaactactggtgcttccttcgggcaggaggtgatgtgctacgagagccctcgccccaacatgggaatccaccgcttcgtgctcgtactcttccagcagctgggccggcagacggtgtacgcgcccgggtggcgccagaacttcaataccagggacttcgccgagctctacaacctcggcccggcc

SEQ ID NO: 729 - DNA, 471 bp, Festuca arundinacea
atggctgggagggatagggacccgttggtggttggaagggttgtgggggacgtgctggaccccttcgtccgcaccactaacctcagggtgacattcggaaaccgggccgtgtccaacggctgcgagctcaagccctccatggtcacccaccagcccagggtcgaggtcggcggcaatgagatgaggaccttctacacactcgtgatggtagaccccgacgcgccaagtccaagcgatcccaacctcagagaatacctccattggttggtgacagatattcctggaactactggtgcttccttcgggcaggaggtgatgtgctacgagagccctcgccccaacatgggaatccaccgcttcgtgctcgtactcttccagcagctgggccggcagacggtgtacgcgcccgggtggcgccagaacttcaataccagggacttcgccgagctctacaacctcggcccggccgtc

SEQ ID NO: 730 - DNA, 474 bp, Festuca arundinacea
atggctgggagggatagggacccgttggtggttggaagggttgtgggggacgtgctggaccccttcgtccgcaccactaacctcagggtgacattcggaaaccgggccgtgtccaacggctgcgagctcaagccctccatggtcacccaccagcccagggtcgaggtcggcggcaatgagatgaggaccttctacacactcgtgatggtagaccccgacgcgccaagtccaagcgatcccaacctcagagaatacctccattggttggtgacagatattcctggaactactggtgcttccttcgggcaggaggtgatgtgctacgagagccctcgccccaacatgggaatccaccgcttcgtgctcgtactcttccagcagctgggccggcagacggtgtacgcgcccgggtggcgccagaacttcaataccagggacttcgccgagctctacaacctcggcccggccgtcgcc

SEQ ID NO: 731 - DNA, 477 bp, Festuca arundinacea
atggctgggagggatagggacccgttggtggttggaagggttgtgggggacgtgctggaccccttcgtccgcaccactaacctcagggtgacattcggaaaccgggccgtgtccaacggctgcgagctcaagccctccatggtcacccaccagcccagggtcgaggtcggcggcaatgagatgaggaccttctacacactcgtgatggtagaccccgacgcgccaagtccaagcgatcccaacctcagagaatacctccattggttggtgacagatattcctggaactactggtgcttccttcgggcaggaggtgatgtgctacgagagccctcgccccaacatgggaatccaccgcttcgtgctcgtactcttccagcagctgggccggcagacggtgtacgcgcccgggtggcgccagaacttcaataccagggacttcgccgagctctacaacctcggcccggccgtcgccgcc

SEQ ID NO: 732 - DNA, 45 bp, Festuca arundinacea
atggctgggagggatagggacccgttggtggttggaagggttgtg

SEQ ID NO: 733 - DNA, 480 bp, Festuca arundinacea
atggctgggagggatagggacccgttggtggttggaagggttgtgggggacgtgctggaccccttcgtccgcaccactaacctcagggtgacattcggaaaccgggccgtgtccaacggctgcgagctcaagccctccatggtcacccaccagcccagggtcgaggtcggcggcaatgagatgaggaccttctacacactcgtgatggtagaccccgacgcgccaagtccaagcgatcccaacctcagagaatacctccattggttggtgacagatattcctggaactactggtgcttccttcgggcaggaggtgatgtgctacgagagccctcgccccaacatgggaatccaccgcttcgtgctcgtactcttccagcagctgggccggcagacggtgtacgcgcccgggtggcgccagaacttcaataccagggacttcgccgagctctacaacctcggcccggccgtcgccgccgtc

SEQ ID NO: 734 - DNA, 483 bp, Festuca arundinacea
atggctgggagggatagggacccgttggtggttggaagggttgtgggggacgtgctggaccccttcgtccgcaccactaacctcagggtgacattcggaaaccgggccgtgtccaacggctgcgagctcaagccctccatggtcacccaccagcccagggtcgaggtcggcggcaatgagatgaggaccttctacacactcgtgatggtagaccccgacgcgccaagtccaagcgatcccaacctcagagaatacctccattggttggtgacagatattcctggaactactggtgcttccttcgggcaggaggtgatgtgctacgagagccctcgccccaacatgggaatccaccgcttcgtgctcgtactcttccagcagctgggccggcagacggtgtacgcgcccgggtggcgccagaacttcaataccagggacttcgccgagctctacaacctcggcccggccgtcgccgccgtctac

SEQ ID NO: 735 - DNA, 486 bp, Festuca arundinacea
atggctgggagggatagggacccgttggtggttggaagggttgtgggggacgtgctggaccccttcgtccgcaccactaacctcagggtgacattcggaaaccgggccgtgtccaacggctgcgagctcaagccctccatggtcacccaccagcccagggtcgaggtcggcggcaatgagatgaggaccttctacacactcgtgatggtagaccccgacgcgccaagtccaagcgatcccaacctcagagaatacctccattggttggtgacagatattcctggaactactggtgcttccttcgggcaggaggtgatgtgctacgagagccctcgccccaacatgggaatccaccgcttcgtgctcgtactcttccagcagctgggccggcagacggtgtacgcgcccgggtggcgccagaacttcaataccagggacttcgccgagctctacaacctcggcccggccgtcgccgccgtctacttc

SEQ ID NO: 736 - DNA, 489 bp, Festuca arundinacea
atggctgggagggatagggacccgttggtggttggaagggttgtgggggacgtgctggaccccttcgtccgcaccactaacctcagggtgacattcggaaaccgggccgtgtccaacggctgcgagctcaagccctccatggtcacccaccagcccagggtcgaggtcggcggcaatgagatgaggaccttctacacactcgtgatggtagaccccgacgcgccaagtccaagcgatcccaacctcagagaatacctccattggttggtgacagatattcctggaactactggtgcttccttcgggcaggaggtgatgtgctacgagagccctcgccccaacatgggaatccaccgcttcgtgctcgtactcttccagcagctgggccggcagacggtgtacgcgcccgggtggcgccagaacttcaataccagggacttcgccgagctctacaacctcggcccggccgtcgccgccgtctacttcaac

SEQ ID NO: 737 - DNA, 492 bp, Festuca arundinacea
atggctgggagggatagggacccgttggtggttggaagggttgtgggggacgtgctggaccccttcgtccgcaccactaacctcagggtgacattcggaaaccgggccgtgtccaacggctgcgagctcaagccctccatggtcacccaccagcccagggtcgaggtcggcggcaatgagatgaggaccttctacacactcgtgatggtagaccccgacgcgccaagtccaagcgatcccaacctcagagaatacctccattggttggtgacagatattcctggaactactggtgcttccttcgggcaggaggtgatgtgctacgagagccctcgccccaacatgggaatccaccgcttcgtgctcgtactcttccagcagctgggccggcagacggtgtacgcgcccgggtggcgccagaacttcaataccagggacttcgccgagctctacaacctcggcccggccgtcgccgccgtctacttcaactgc

SEQ ID NO: 738 - DNA, 495 bp, Festuca arundinacea
atggctgggagggatagggacccgttggtggttggaagggttgtgggggacgtgctggaccccttcgtccgcaccactaacctcagggtgacattcggaaaccgggccgtgtccaacggctgcgagctcaagccctccatggtcacccaccagcccagggtcgaggtcggcggcaatgagatgaggaccttctacacactcgtgatggtagaccccgacgcgccaagtccaagcgatcccaacctcagagaatacctccattggttggtgacagatattcctggaactactggtgcttccttcgggcaggaggtgatgtgctacgagagccctcgccccaacatgggaatccaccgcttcgtgctcgtactcttccagcagctgggccggcagacggtgtacgcgcccgggtggcgccagaacttcaataccagggacttcgccgagctctacaacctcggcccggccgtcgccgccgtctacttcaactgccag

SEQ ID NO: 739 - DNA, 498 bp, Festuca arundinacea
atggctgggagggatagggacccgttggtggttggaagggttgtgggggacgtgctggaccccttcgtccgcaccactaacctcagggtgacattcggaaaccgggccgtgtccaacggctgcgagctcaagccctccatggtcacccaccagcccagggtcgaggtcggcggcaatgagatgaggaccttctacacactcgtgatggtagaccccgacgcgccaagtccaagcgatcccaacctcagagaatacctccattggttggtgacagatattcctggaactactggtgcttccttcgggcaggaggtgatgtgctacgagagccctcgccccaacatgggaatccaccgcttcgtgctcgtactcttccagcagctgggccggcagacggtgtacgcgcccgggtggcgccagaacttcaataccagggacttcgccgagctctacaacctcggcccggccgtcgccgccgtctacttcaactgccagcgc

SEQ ID NO: 740 - DNA, 501 bp, Festuca arundinacea
atggctgggagggatagggacccgttggtggttggaagggttgtgggggacgtgctggaccccttcgtccgcaccactaacctcagggtgacattcggaaaccgggccgtgtccaacggctgcgagctcaagccctccatggtcacccaccagcccagggtcgaggtcggcggcaatgagatgaggaccttctacacactcgtgatggtagaccccgacgcgccaagtccaagcgatcccaacctcagagaatacctccattggttggtgacagatattcctggaactactggtgcttccttcgggcaggaggtgatgtgctacgagagccctcgccccaacatgggaatccaccgcttcgtgctcgtactcttccagcagctgggccggcagacggtgtacgcgcccgggtggcgccagaacttcaataccagggacttcgccgagctctacaacctcggcccggccgtcgccgccgtctacttcaactgccagcgcgag

SEQ ID NO: 741 - DNA, 504 bp, Festuca arundinacea
atggctgggagggatagggacccgttggtggttggaagggttgtgggggacgtgctggaccccttcgtccgcaccactaacctcagggtgacattcggaaaccgggccgtgtccaacggctgcgagctcaagccctccatggtcacccaccagcccagggtcgaggtcggcggcaatgagatgaggaccttctacacactcgtgatggtagaccccgacgcgccaagtccaagcgatcccaacctcagagaatacctccattggttggtgacagatattcctggaactactggtgcttccttcgggcaggaggtgatgtgctacgagagccctcgccccaacatgggaatccaccgcttcgtgctcgtactcttccagcagctgggccggcagacggtgtacgcgcccgggtggcgccagaacttcaataccagggacttcgccgagctctacaacctcggcccggccgtcgccgccgtctacttcaactgccagcgcgaggcc

SEQ ID NO: 742 - DNA, 507 bp, Festuca arundinacea
atggctgggagggatagggacccgttggtggttggaagggttgtgggggacgtgctggaccccttcgtccgcaccactaacctcagggtgacattcggaaaccgggccgtgtccaacggctgcgagctcaagccctccatggtcacccaccagcccagggtcgaggtcggcggcaatgagatgaggaccttctacacactcgtgatggtagaccccgacgcgccaagtccaagcgatcccaacctcagagaatacctccattggttggtgacagatattcctggaactactggtgcttccttcgggcaggaggtgatgtgctacgagagccctcgccccaacatgggaatccaccgcttcgtgctcgtactcttccagcagctgggccggcagacggtgtacgcgcccgggtggcgccagaacttcaataccagggacttcgccgagctctacaacctcggcccggccgtcgccgccgtctacttcaactgccagcgcgaggccggc

SEQ ID NO: 743 - DNA, 48 bp, Festuca arundinacea
atggctgggagggatagggacccgttggtggttggaagggttgtgggg

SEQ ID NO: 744 - DNA, 510 bp, Festuca arundinacea
atggctgggagggatagggacccgttggtggttggaagggttgtgggggacgtgctggaccccttcgtccgcaccactaacctcagggtgacattcggaaaccgggccgtgtccaacggctgcgagctcaagccctccatggtcacccaccagcccagggtcgaggtcggcggcaatgagatgaggaccttctacacactcgtgatggtagaccccgacgcgccaagtccaagcgatcccaacctcagagaatacctccattggttggtgacagatattcctggaactactggtgcttccttcgggcaggaggtgatgtgctacgagagccctcgccccaacatgggaatccaccgcttcgtgctcgtactcttccagcagctgggccggcagacggtgtacgcgcccgggtggcgccagaacttcaataccagggacttcgccgagctctacaacctcggcccggccgtcgccgccgtctacttcaactgccagcgcgaggccggctct

SEQ ID NO: 745 - DNA, 513 bp, Festuca arundinacea
atggctgggagggatagggacccgttggtggttggaagggttgtgggggacgtgctggaccccttcgtccgcaccactaacctcagggtgacattcggaaaccgggccgtgtccaacggctgcgagctcaagccctccatggtcacccaccagcccagggtcgaggtcggcggcaatgagatgaggaccttctacacactcgtgatggtagaccccgacgcgccaagtccaagcgatcccaacctcagagaatacctccattggttggtgacagatattcctggaactactggtgcttccttcgggcaggaggtgatgtgctacgagagccctcgccccaacatgggaatccaccgcttcgtgctcgtactcttccagcagctgggccggcagacggtgtacgcgcccgggtggcgccagaacttcaataccagggacttcgccgagctctacaacctcggcccggccgtcgccgccgtctacttcaactgccagcgcgaggccggctctggc

SEQ ID NO: 746 - DNA, 516 bp, Festuca arundinacea
atggctgggagggatagggacccgttggtggttggaagggttgtgggggacgtgctggaccccttcgtccgcaccactaacctcagggtgacattcggaaaccgggccgtgtccaacggctgcgagctcaagccctccatggtcacccaccagcccagggtcgaggtcggcggcaatgagatgaggaccttctacacactcgtgatggtagaccccgacgcgccaagtccaagcgatcccaacctcagagaatacctccattggttggtgacagatattcctggaactactggtgcttccttcgggcaggaggtgatgtgctacgagagccctcgccccaacatgggaatccaccgcttcgtgctcgtactcttccagcagctgggccggcagacggtgtacgcgcccgggtggcgccagaacttcaataccagggacttcgccgagctctacaacctcggcccggccgtcgccgccgtctacttcaactgccagcgcgaggccggctctggcggc

SEQ ID NO: 747 - DNA, 51 bp, Festuca arundinacea
atggctgggagggatagggacccgttggtggttggaagggttgtgggggac

SEQ ID NO: 748 - DNA, 54 bp, Festuca arundinacea
atggctgggagggatagggacccgttggtggttggaagggttgtgggggacgtg

SEQ ID NO: 749 - DNA, 57 bp, Festuca arundinacea
atggctgggagggatagggacccgttggtggttggaagggttgtgggggacgtgctg

SEQ ID NO: 750 - DNA, 60 bp, Festuca arundinacea
atggctgggagggatagggacccgttggtggttggaagggttgtgggggacgtgctggac

SEQ ID NO: 751 - DNA, 63 bp, Festuca arundinacea
atggctgggagggatagggacccgttggtggttggaagggttgtgggggacgtgctggacccc

SEQ ID NO: 752 - DNA, 66 bp, Festuca arundinacea
atggctgggagggatagggacccgttggtggttggaagggttgtgggggacgtgctggaccccttc

SEQ ID NO: 753 - DNA, 69 bp, Festuca arundinacea
atggctgggagggatagggacccgttggtggttggaagggttgtgggggacgtgctggaccccttcgtc

SEQ ID NO: 754 - DNA, 72 bp, Festuca arundinacea
atggctgggagggatagggacccgttggtggttggaagggttgtgggggacgtgctggaccccttcgtccgc

SEQ ID NO: 755 - DNA, 75 bp, Festuca arundinacea
atggctgggagggatagggacccgttggtggttggaagggttgtgggggacgtgctggaccccttcgtccgcacc

SEQ ID NO: 756 - DNA, 12 bp, Festuca arundinacea
atggctgggagg

SEQ ID NO: 757 - DNA, 15 bp, Festuca arundinacea
atggctgggagggat

SEQ ID NO: 758 - DNA, 18 bp, Festuca arundinacea
atggctgggagggatagg

SEQ ID NO: 759 - DNA, 21 bp, Festuca arundinacea
atggctgggagggatagggac

SEQ ID NO: 760 - DNA, 261 bp, Festuca arundinacea
atggctgggagggatagggacccgttggtggttggaagggttgtgggggacgtgctggaccccttcgtccgcaccactaacctcagggtgacattcggaaaccgggccgtgtccaacggctgcgagctcaagccctccatggtcacccaccagcccagggtcgaggtcggcggcaatgagatgaggaccttctacacactcgtgatggtagaccccgacgcgccaagtccaagcgatcccaacctcagagaatacctccat

SEQ ID NO: 761 - DNA, 24 bp, Festuca arundinacea
atggctgggagggatagggacccg

SEQ ID NO: 762 - DNA, 27 bp, Festuca arundinacea
atggctgggagggatagggacccgttg

SEQ ID NO: 763 - DNA, 504 bp, Festuca arundinacea
gttggaagggttgtgggggacgtgctggaccccttcgtccgcaccactaacctcagggtgacattcggaaaccgggccgtgtccaacggctgcgagctcaagccctccatggtcacccaccagcccagggtcgaggtcggcggcaatgagatgaggaccttctacacactcgtgatggtagaccccgacgcgccaagtccaagcgatcccaacctcagagaatacctccattggttggtgacagatattcctggaactactggtgcttccttcgggcaggaggtgatgtgctacgagagccctcgccccaacatgggaatccaccgcttcgtgctcgtactcttccagcagctgggccggcagacggtgtacgcgcccgggtggcgccagaacttcaataccagggacttcgccgagctctacaacctcggcccggccgtcgccgccgtctacttcaactgccagcgcgaggccggctctggcggcaggaggatgtataattga

SEQ ID NO: 764 - DNA, 501 bp, Festuca arundinacea
ggaagggttgtgggggacgtgctggaccccttcgtccgcaccactaacctcagggtgacattcggaaaccgggccgtgtccaacggctgcgagctcaagccctccatggtcacccaccagcccagggtcgaggtcggcggcaatgagatgaggaccttctacacactcgtgatggtagaccccgacgcgccaagtccaagcgatcccaacctcagagaatacctccattggttggtgacagatattcctggaactactggtgcttccttcgggcaggaggtgatgtgctacgagagccctcgccccaacatgggaatccaccgcttcgtgctcgtactcttccagcagctgggccggcagacggtgtacgcgcccgggtggcgccagaacttcaataccagggacttcgccgagctctacaacctcggcccggccgtcgccgccgtctacttcaactgccagcgcgaggccggctctggcggcaggaggatgtataattga

SEQ ID NO: 765 - DNA, 498 bp, Festuca arundinacea
agggttgtgggggacgtgctggaccccttcgtccgcaccactaacctcagggtgacattcggaaaccgggccgtgtccaacggctgcgagctcaagccctccatggtcacccaccagcccagggtcgaggtcggcggcaatgagatgaggaccttctacacactcgtgatggtagaccccgacgcgccaagtccaagcgatcccaacctcagagaatacctccattggttggtgacagatattcctggaactactggtgcttccttcgggcaggaggtgatgtgctacgagagccctcgccccaacatgggaatccaccgcttcgtgctcgtactcttccagcagctgggccggcagacggtgtacgcgcccgggtggcgccagaacttcaataccagggacttcgccgagctctacaacctcggcccggccgtcgccgccgtctacttcaactgccagcgcgaggccggctctggcggcaggaggatgtataattga

SEQ ID NO: 766 - DNA, 495 bp, Festuca arundinacea
gttgtgggggacgtgctggaccccttcgtccgcaccactaacctcagggtgacattcggaaaccgggccgtgtccaacggctgcgagctcaagccctccatggtcacccaccagcccagggtcgaggtcggcggcaatgagatgaggaccttctacacactcgtgatggtagaccccgacgcgccaagtccaagcgatcccaacctcagagaatacctccattggttggtgacagatattcctggaactactggtgcttccttcgggcaggaggtgatgtgctacgagagccctcgccccaacatgggaatccaccgcttcgtgctcgtactcttccagcagctgggccggcagacggtgtacgcgcccgggtggcgccagaacttcaataccagggacttcgccgagctctacaacctcggcccggccgtcgccgccgtctacttcaactgccagcgcgaggccggctctggcggcaggaggatgtataattga

SEQ ID NO: 767 - DNA, 492 bp, Festuca arundinacea
gtgggggacgtgctggaccccttcgtccgcaccactaacctcagggtgacattcggaaaccgggccgtgtccaacggctgcgagctcaagccctccatggtcacccaccagcccagggtcgaggtcggcggcaatgagatgaggaccttctacacactcgtgatggtagaccccgacgcgccaagtccaagcgatcccaacctcagagaatacctccattggttggtgacagatattcctggaactactggtgcttccttcgggcaggaggtgatgtgctacgagagccctcgccccaacatgggaatccaccgcttcgtgctcgtactcttccagcagctgggccggcagacggtgtacgcgcccgggtggcgccagaacttcaataccagggacttcgccgagctctacaacctcggcccggccgtcgccgccgtctacttcaactgccagcgcgaggccggctctggcggcaggaggatgtataattga

SEQ ID NO: 768 - DNA, 489 bp, Festuca arundinacea
ggggacgtgctggaccccttcgtccgcaccactaacctcagggtgacattcggaaaccgggccgtgtccaacggctgcgagctcaagccctccatggtcacccaccagcccagggtcgaggtcggcggcaatgagatgaggaccttctacacactcgtgatggtagaccccgacgcgccaagtccaagcgatcccaacctcagagaatacctccattggttggtgacagatattcctggaactactggtgcttccttcgggcaggaggtgatgtgctacgagagccctcgccccaacatgggaatccaccgcttcgtgctcgtactcttccagcagctgggccggcagacggtgtacgcgcccgggtggcgccagaacttcaataccagggacttcgccgagctctacaacctcggcccggccgtcgccgccgtctacttcaactgccagcgcgaggccggctctggcggcaggaggatgtataattga

SEQ ID NO: 769 - DNA, 486 bp, Festuca arundinacea
gacgtgctggaccccttcgtccgcaccactaacctcagggtgacattcggaaaccgggccgtgtccaacggctgcgagctcaagccctccatggtcacccaccagcccagggtcgaggtcggcggcaatgagatgaggaccttctacacactcgtgatggtagaccccgacgcgccaagtccaagcgatcccaacctcagagaatacctccattggttggtgacagatattcctggaactactggtgcttccttcgggcaggaggtgatgtgctacgagagccctcgccccaacatgggaatccaccgcttcgtgctcgtactcttccagcagctgggccggcagacggtgtacgcgcccgggtggcgccagaacttcaataccagggacttcgccgagctctacaacctcggcccggccgtcgccgccgtctacttcaactgccagcgcgaggccggctctggcggcaggaggatgtataattga

SEQ ID NO: 770 - DNA, 483 bp, Festuca arundinacea
gtgctggaccccttcgtccgcaccactaacctcagggtgacattcggaaaccgggccgtgtccaacggctgcgagctcaagccctccatggtcacccaccagcccagggtcgaggtcggcggcaatgagatgaggaccttctacacactcgtgatggtagaccccgacgcgccaagtccaagcgatcccaacctcagagaatacctccattggttggtgacagatattcctggaactactggtgcttccttcgggcaggaggtgatgtgctacgagagccctcgccccaacatgggaatccaccgcttcgtgctcgtactcttccagcagctgggccggcagacggtgtacgcgcccgggtggcgccagaacttcaataccagggacttcgccgagctctacaacctcggcccggccgtcgccgccgtctacttcaactgccagcgcgaggccggctctggcggcaggaggatgtataattga

SEQ ID NO: 771 - DNA, 480 bp, Festuca arundinacea
ctggaccccttcgtccgcaccactaacctcagggtgacattcggaaaccgggccgtgtccaacggctgcgagctcaagccctccatggtcacccaccagcccagggtcgaggtcggcggcaatgagatgaggaccttctacacactcgtgatggtagaccccgacgcgccaagtccaagcgatcccaacctcagagaatacctccattggttggtgacagatattcctggaactactggtgcttccttcgggcaggaggtgatgtgctacgagagccctcgccccaacatgggaatccaccgcttcgtgctcgtactcttccagcagctgggccggcagacggtgtacgcgcccgggtggcgccagaacttcaataccagggacttcgccgagctctacaacctcggcccggccgtcgccgccgtctacttcaactgccagcgcgaggccggctctggcggcaggaggatgtataattga

SEQ ID NO: 772 - DNA, 477 bp, Festuca arundinacea
gaccccttcgtccgcaccactaacctcagggtgacattcggaaaccgggccgtgtccaacggctgcgagctcaagccctccatggtcacccaccagcccagggtcgaggtcggcggcaatgagatgaggaccttctacacactcgtgatggtagaccccgacgcgccaagtccaagcgatcccaacctcagagaatacctccattggttggtgacagatattcctggaactactggtgcttccttcgggcaggaggtgatgtgctacgagagccctcgccccaacatgggaatccaccgcttcgtgctcgtactcttccagcagctgggccggcagacggtgtacgcgcccgggtggcgccagaacttcaataccagggacttcgccgagctctacaacctcggcccggccgtcgccgccgtctacttcaactgccagcgcgaggccggctctggcggcaggaggatgtataattga

SEQ ID NO: 773 - DNA, 531 bp, Festuca arundinacea
gctgggagggatagggacccgttggtggttggaagggttgtgggggacgtgctggaccccttcgtccgcaccactaacctcagggtgacattcggaaaccgggccgtgtccaacggctgcgagctcaagccctccatggtcacccaccagcccagggtcgaggtcggcggcaatgagatgaggaccttctacacactcgtgatggtagaccccgacgcgccaagtccaagcgatcccaacctcagagaatacctccattggttggtgacagatattcctggaactactggtgcttccttcgggcaggaggtgatgtgctacgagagccctcgccccaacatgggaatccaccgcttcgtgctcgtactcttccagcagctgggccggcagacggtgtacgcgcccgggtggcgccagaacttcaataccagggacttcgccgagctctacaacctcggcccggccgtcgccgccgtctacttcaactgccagcgcgaggccggctctggcggcaggaggatgtataattga

SEQ ID NO: 774 - DNA, 474 bp, Festuca arundinacea
cccttcgtccgcaccactaacctcagggtgacattcggaaaccgggccgtgtccaacggctgcgagctcaagccctccatggtcacccaccagcccagggtcgaggtcggcggcaatgagatgaggaccttctacacactcgtgatggtagaccccgacgcgccaagtccaagcgatcccaacctcagagaatacctccattggttggtgacagatattcctggaactactggtgcttccttcgggcaggaggtgatgtgctacgagagccctcgccccaacatgggaatccaccgcttcgtgctcgtactcttccagcagctgggccggcagacggtgtacgcgcccgggtggcgccagaacttcaataccagggacttcgccgagctctacaacctcggcccggccgtcgccgccgtctacttcaactgccagcgcgaggccggctctggcggcaggaggatgtataattga

SEQ ID NO: 775 - DNA, 471 bp, Festuca arundinacea
ttcgtccgcaccactaacctcagggtgacattcggaaaccgggccgtgtccaacggctgcgagctcaagccctccatggtcacccaccagcccagggtcgaggtcggcggcaatgagatgaggaccttctacacactcgtgatggtagaccccgacgcgccaagtccaagcgatcccaacctcagagaatacctccattggttggtgacagatattcctggaactactggtgcttccttcgggcaggaggtgatgtgctacgagagccctcgccccaacatgggaatccaccgcttcgtgctcgtactcttccagcagctgggccggcagacggtgtacgcgcccgggtggcgccagaacttcaataccagggacttcgccgagctctacaacctcggcccggccgtcgccgccgtctacttcaactgccagcgcgaggccggctctggcggcaggaggatgtataattga

SEQ ID NO: 776 - DNA, 468 bp, Festuca arundinacea
gtccgcaccactaacctcagggtgacattcggaaaccgggccgtgtccaacggctgcgagctcaagccctccatggtcacccaccagcccagggtcgaggtcggcggcaatgagatgaggaccttctacacactcgtgatggtagaccccgacgcgccaagtccaagcgatcccaacctcagagaatacctccattggttggtgacagatattcctggaactactggtgcttccttcgggcaggaggtgatgtgctacgagagccctcgccccaacatgggaatccaccgcttcgtgctcgtactcttccagcagctgggccggcagacggtgtacgcgcccgggtggcgccagaacttcaataccagggacttcgccgagctctacaacctcggcccggccgtcgccgccgtctacttcaactgccagcgcgaggccggctctggcggcaggaggatgtataattga

SEQ ID NO: 777 - DNA, 465 bp, Festuca arundinacea
cgcaccactaacctcagggtgacattcggaaaccgggccgtgtccaacggctgcgagctcaagccctccatggtcacccaccagcccagggtcgaggtcggcggcaatgagatgaggaccttctacacactcgtgatggtagaccccgacgcgccaagtccaagcgatcccaacctcagagaatacctccattggttggtgacagatattcctggaactactggtgcttccttcgggcaggaggtgatgtgctacgagagccctcgccccaacatgggaatccaccgcttcgtgctcgtactcttccagcagctgggccggcagacggtgtacgcgcccgggtggcgccagaacttcaataccagggacttcgccgagctctacaacctcggcccggccgtcgccgccgtctacttcaactgccagcgcgaggccggctctggcggcaggaggatgtataattga

SEQ ID NO: 778 - DNA, 462 bp, Festuca arundinacea
accactaacctcagggtgacattcggaaaccgggccgtgtccaacggctgcgagctcaagccctccatggtcacccaccagcccagggtcgaggtcggcggcaatgagatgaggaccttctacacactcgtgatggtagaccccgacgcgccaagtccaagcgatcccaacctcagagaatacctccattggttggtgacagatattcctggaactactggtgcttccttcgggcaggaggtgatgtgctacgagagccctcgccccaacatgggaatccaccgcttcgtgctcgtactcttccagcagctgggccggcagacggtgtacgcgcccgggtggcgccagaacttcaataccagggacttcgccgagctctacaacctcggcccggccgtcgccgccgtctacttcaactgccagcgcgaggccggctctggcggcaggaggatgtataattga

SEQ ID NO: 779 - DNA, 459 bp, Festuca arundinacea
actaacctcagggtgacattcggaaaccgggccgtgtccaacggctgcgagctcaagccctccatggtcacccaccagcccagggtcgaggtcggcggcaatgagatgaggaccttctacacactcgtgatggtagaccccgacgcgccaagtccaagcgatcccaacctcagagaatacctccattggttggtgacagatattcctggaactactggtgcttccttcgggcaggaggtgatgtgctacgagagccctcgccccaacatgggaatccaccgcttcgtgctcgtactcttccagcagctgggccggcagacggtgtacgcgcccgggtggcgccagaacttcaataccagggacttcgccgagctctacaacctcggcccggccgtcgccgccgtctacttcaactgccagcgcgaggccggctctggcggcaggaggatgtataattga

SEQ ID NO: 780 - DNA, 456 bp, Festuca arundinacea
aacctcagggtgacattcggaaaccgggccgtgtccaacggctgcgagctcaagccctccatggtcacccaccagcccagggtcgaggtcggcggcaatgagatgaggaccttctacacactcgtgatggtagaccccgacgcgccaagtccaagcgatcccaacctcagagaatacctccattggttggtgacagatattcctggaactactggtgcttccttcgggcaggaggtgatgtgctacgagagccctcgccccaacatgggaatccaccgcttcgtgctcgtactcttccagcagctgggccggcagacggtgtacgcgcccgggtggcgccagaacttcaataccagggacttcgccgagctctacaacctcggcccggccgtcgccgccgtctacttcaactgccagcgcgaggccggctctggcggcaggaggatgtataattga

SEQ ID NO: 781 - DNA, 453 bp, Festuca arundinacea
ctcagggtgacattcggaaaccgggccgtgtccaacggctgcgagctcaagccctccatggtcacccaccagcccagggtcgaggtcggcggcaatgagatgaggaccttctacacactcgtgatggtagaccccgacgcgccaagtccaagcgatcccaacctcagagaatacctccattggttggtgacagatattcctggaactactggtgcttccttcgggcaggaggtgatgtgctacgagagccctcgccccaacatgggaatccaccgcttcgtgctcgtactcttccagcagctgggccggcagacggtgtacgcgcccgggtggcgccagaacttcaataccagggacttcgccgagctctacaacctcggcccggccgtcgccgccgtctacttcaactgccagcgcgaggccggctctggcggcaggaggatgtataattga

SEQ ID NO: 782 - DNA, 426 bp, Festuca arundinacea
gtgtccaacggctgcgagctcaagccctccatggtcacccaccagcccagggtcgaggtcggcggcaatgagatgaggaccttctacacactcgtgatggtagaccccgacgcgccaagtccaagcgatcccaacctcagagaatacctccattggttggtgacagatattcctggaactactggtgcttccttcgggcaggaggtgatgtgctacgagagccctcgccccaacatgggaatccaccgcttcgtgctcgtactcttccagcagctgggccggcagacggtgtacgcgcccgggtggcgccagaacttcaataccagggacttcgccgagctctacaacctcggcccggccgtcgccgccgtctacttcaactgccagcgcgaggccggctctggcggcaggaggatgtataattga

SEQ ID NO: 783 - DNA, 525 bp, Festuca arundinacea
agggatagggacccgttggtggttggaagggttgtgggggacgtgctggaccccttcgtccgcaccactaacctcagggtgacattcggaaaccgggccgtgtccaacggctgcgagctcaagccctccatggtcacccaccagcccagggtcgaggtcggcggcaatgagatgaggaccttctacacactcgtgatggtagaccccgacgcgccaagtccaagcgatcccaacctcagagaatacctccattggttggtgacagatattcctggaactactggtgcttccttcgggcaggaggtgatgtgctacgagagccctcgccccaacatgggaatccaccgcttcgtgctcgtactcttccagcagctgggccggcagacggtgtacgcgcccgggtggcgccagaacttcaataccagggacttcgccgagctctacaacctcggcccggccgtcgccgccgtctacttcaactgccagcgcgaggccggctctggcggcaggaggatgtataattga

SEQ ID NO: 784 - DNA, 393 bp, Festuca arundinacea
gtcacccaccagcccagggtcgaggtcggcggcaatgagatgaggaccttctacacactcgtgatggtagaccccgacgcgccaagtccaagcgatcccaacctcagagaatacctccattggttggtgacagatattcctggaactactggtgcttccttcgggcaggaggtgatgtgctacgagagccctcgccccaacatgggaatccaccgcttcgtgctcgtactcttccagcagctgggccggcagacggtgtacgcgcccgggtggcgccagaacttcaataccagggacttcgccgagctctacaacctcggcccggccgtcgccgccgtctacttcaactgccagcgcgaggccggctctggcggcaggaggatgtataattga

SEQ ID NO: 785 - DNA, 522 bp, Festuca arundinacea
gatagggacccgttggtggttggaagggttgtgggggacgtgctggaccccttcgtccgcaccactaacctcagggtgacattcggaaaccgggccgtgtccaacggctgcgagctcaagccctccatggtcacccaccagcccagggtcgaggtcggcggcaatgagatgaggaccttctacacactcgtgatggtagaccccgacgcgccaagtccaagcgatcccaacctcagagaatacctccattggttggtgacagatattcctggaactactggtgcttccttcgggcaggaggtgatgtgctacgagagccctcgccccaacatgggaatccaccgcttcgtgctcgtactcttccagcagctgggccggcagacggtgtacgcgcccgggtggcgccagaacttcaataccagggacttcgccgagctctacaacctcggcccggccgtcgccgccgtctacttcaactgccagcgcgaggccggctctggcggcaggaggatgtataattga

SEQ ID NO: 786 - DNA, 519 bp, Festuca arundinacea
agggacccgttggtggttggaagggttgtgggggacgtgctggaccccttcgtccgcaccactaacctcagggtgacattcggaaaccgggccgtgtccaacggctgcgagctcaagccctccatggtcacccaccagcccagggtcgaggtcggcggcaatgagatgaggaccttctacacactcgtgatggtagaccccgacgcgccaagtccaagcgatcccaacctcagagaatacctccattggttggtgacagatattcctggaactactggtgcttccttcgggcaggaggtgatgtgctacgagagccctcgccccaacatgggaatccaccgcttcgtgctcgtactcttccagcagctgggccggcagacggtgtacgcgcccgggtggcgccagaacttcaataccagggacttcgccgagctctacaacctcggcccggccgtcgccgccgtctacttcaactgccagcgcgaggccggctctggcggcaggaggatgtataattga

SEQ ID NO: 787 - DNA, 330 bp, Festuca arundinacea
atggtagaccccgacgcgccaagtccaagcgatcccaacctcagagaatacctccattggttggtgacagatattcctggaactactggtgcttccttcgggcaggaggtgatgtgctacgagagccctcgccccaacatgggaatccaccgcttcgtgctcgtactcttccagcagctgggccggcagacggtgtacgcgcccgggtggcgccagaacttcaataccagggacttcgccgagctctacaacctcggcccggccgtcgccgccgtctacttcaactgccagcgcgaggccggctctggcggcaggaggatgtataattga

SEQ ID NO: 788 - DNA, 516 bp, Festuca arundinacea
gacccgttggtggttggaagggttgtgggggacgtgctggaccccttcgtccgcaccactaacctcagggtgacattcggaaaccgggccgtgtccaacggctgcgagctcaagccctccatggtcacccaccagcccagggtcgaggtcggcggcaatgagatgaggaccttctacacactcgtgatggtagaccccgacgcgccaagtccaagcgatcccaacctcagagaatacctccattggttggtgacagatattcctggaactactggtgcttccttcgggcaggaggtgatgtgctacgagagccctcgccccaacatgggaatccaccgcttcgtgctcgtactcttccagcagctgggccggcagacggtgtacgcgcccgggtggcgccagaacttcaataccagggacttcgccgagctctacaacctcggcccggccgtcgccgccgtctacttcaactgccagcgcgaggccggctctggcggcaggaggatgtataattga

SEQ ID NO: 789 - DNA, 513 bp, Festuca arundinacea
ccgttggtggttggaagggttgtgggggacgtgctggaccccttcgtccgcaccactaacctcagggtgacattcggaaaccgggccgtgtccaacggctgcgagctcaagccctccatggtcacccaccagcccagggtcgaggtcggcggcaatgagatgaggaccttctacacactcgtgatggtagaccccgacgcgccaagtccaagcgatcccaacctcagagaatacctccattggttggtgacagatattcctggaactactggtgcttccttcgggcaggaggtgatgtgctacgagagccctcgccccaacatgggaatccaccgcttcgtgctcgtactcttccagcagctgggccggcagacggtgtacgcgcccgggtggcgccagaacttcaataccagggacttcgccgagctctacaacctcggcccggccgtcgccgccgtctacttcaactgccagcgcgaggccggctctggcggcaggaggatgtataattga

SEQ ID NO: 790 - DNA, 510 bp, Festuca arundinacea
ttggtggttggaagggttgtgggggacgtgctggaccccttcgtccgcaccactaacctcagggtgacattcggaaaccgggccgtgtccaacggctgcgagctcaagccctccatggtcacccaccagcccagggtcgaggtcggcggcaatgagatgaggaccttctacacactcgtgatggtagaccccgacgcgccaagtccaagcgatcccaacctcagagaatacctccattggttggtgacagatattcctggaactactggtgcttccttcgggcaggaggtgatgtgctacgagagccctcgccccaacatgggaatccaccgcttcgtgctcgtactcttccagcagctgggccggcagacggtgtacgcgcccgggtggcgccagaacttcaataccagggacttcgccgagctctacaacctcggcccggccgtcgccgccgtctacttcaactgccagcgcgaggccggctctggcggcaggaggatgtataattga

SEQ ID NO: 791 - DNA, 243 bp, Festuca arundinacea
ggtgcttccttcgggcaggaggtgatgtgctacgagagccctcgccccaacatgggaatccaccgcttcgtgctcgtactcttccagcagctgggccggcagacggtgtacgcgcccgggtggcgccagaacttcaataccagggacttcgccgagctctacaacctcggcccggccgtcgccgccgtctacttcaactgccagcgcgaggccggctctggcggcaggaggatgtataattga

SEQ ID NO: 792 - DNA, 507 bp, Festuca arundinacea
gtggttggaagggttgtgggggacgtgctggaccccttcgtccgcaccactaacctcagggtgacattcggaaaccgggccgtgtccaacggctgcgagctcaagccctccatggtcacccaccagcccagggtcgaggtcggcggcaatgagatgaggaccttctacacactcgtgatggtagaccccgacgcgccaagtccaagcgatcccaacctcagagaatacctccattggttggtgacagatattcctggaactactggtgcttccttcgggcaggaggtgatgtgctacgagagccctcgccccaacatgggaatccaccgcttcgtgctcgtactcttccagcagctgggccggcagacggtgtacgcgcccgggtggcgccagaacttcaataccagggacttcgccgagctctacaacctcggcccggccgtcgccgccgtctacttcaactgccagcgcgaggccggctctggcggcaggaggatgtataattga

SEQ ID NO: 793 - protein, 177 aa, Festuca arundinacea
MAGRDRDPLVVGRVVGDVLDPFVRTTNLRVTFGNRAVSNGCELKPSMVTHQPRVEVGGNEMRTFYTLVMVDPDAPSPSDPNLREYLHWLVTDIPGTTGASFGQEVMCYESPRPNMGIHRFVLVLFQQLGRQTVYAPGWRQNFNTRDFAELYNLGPAVAAVYFNCQREAGSGGRRMYN

SEQ ID NO: 794 - protein, 103 aa, Festuca arundinacea
MAGRDRDPLVVGRVVGDVLDPFVRTTNLRVTFGNRAVSNGCELKPSMVTHQPRVEVGGNEMRTFYTLVMVDPDAPSPSDPNLREYLHWLVTDIPGTTGASFGQ

SEQ ID NO: 795 - protein, 10 aa, Festuca arundinacea
MAGRDRDPLV

SEQ ID NO: 796 - protein, 11 aa, Festuca arundinacea
MAGRDRDPLVV

SEQ ID NO: 797 - protein, 12 aa, Festuca arundinacea
MAGRDRDPLVVG

SEQ ID NO: 798 - protein, 137 aa, Festuca arundinacea
MAGRDRDPLVVGRVVGDVLDPFVRTTNLRVTFGNRAVSNGCELKPSMVTHQPRVEVGGNEMRTFYTLVMVDPDAPSPSDPNLREYLHWLVTDIPGTTGASFGQEVMCYESPRPNMGIHRFVLVLFQQLGRQTVYAPG

SEQ ID NO: 799 - protein, 13 aa, Festuca arundinacea
MAGRDRDPLVVGR

SEQ ID NO: 800 - protein, 14 aa, Festuca arundinacea
MAGRDRDPLVVGRV

SEQ ID NO: 801 - protein, 151 aa, Festuca arundinacea
MAGRDRDPLVVGRVVGDVLDPFVRTTNLRVTFGNRAVSNGCELKPSMVTHQPRVEVGGNEMRTFYTLVMVDPDAPSPSDPNLREYLHWLVTDIPGTTGASFGQEVMCYESPRPNMGIHRFVLVLFQQLGRQTVYAPGWRQNFNTRDFAELY

SEQ ID NO: 802 - protein, 152 aa, Festuca arundinacea
MAGRDRDPLVVGRVVGDVLDPFVRTTNLRVTFGNRAVSNGCELKPSMVTHQPRVEVGGNEMRTFYTLVMVDPDAPSPSDPNLREYLHWLVTDIPGTTGASFGQEVMCYESPRPNMGIHRFVLVLFQQLGRQTVYAPGWRQNFNTRDFAELYN

SEQ ID NO: 803 - protein, 153 aa, Festuca arundinacea
MAGRDRDPLVVGRVVGDVLDPFVRTTNLRVTFGNRAVSNGCELKPSMVTHQPRVEVGGNEMRTFYTLVMVDPDAPSPSDPNLREYLHWLVTDIPGTTGASFGQEVMCYESPRPNMGIHRFVLVLFQQLGRQTVYAPGWRQNFNTRDFAELYNL

SEQ ID NO: 804 - protein, 154 aa, Festuca arundinacea
MAGRDRDPLVVGRVVGDVLDPFVRTTNLRVTFGNRAVSNGCELKPSMVTHQPRVEVGGNEMRTFYTLVMVDPDAPSPSDPNLREYLHWLVTDIPGTTGASFGQEVMCYESPRPNMGIHRFVLVLFQQLGRQTVYAPGWRQNFNTRDFAELYNLG

SEQ ID NO: 805 - protein, 155 aa, Festuca arundinacea
MAGRDRDPLVVGRVVGDVLDPFVRTTNLRVTFGNRAVSNGCELKPSMVTHQPRVEVGGNEMRTFYTLVMVDPDAPSPSDPNLREYLHWLVTDIPGTTGASFGQEVMCYESPRPNMGIHRFVLVLFQQLGRQTVYAPGWRQNFNTRDFAELYNLGP

SEQ ID NO: 806 - protein, 156 aa, Festuca arundinacea
MAGRDRDPLVVGRVVGDVLDPFVRTTNLRVTFGNRAVSNGCELKPSMVTHQPRVEVGGNEMRTFYTLVMVDPDAPSPSDPNLREYLHWLVTDIPGTTGASFGQEVMCYESPRPNMGIHRFVLVLFQQLGRQTVYAPGWRQNFNTRDFAELYNLGPA

SEQ ID NO: 807 - protein, 157 aa, Festuca arundinacea
MAGRDRDPLVVGRVVGDVLDPFVRTTNLRVTFGNRAVSNGCELKPSMVTHQPRVEVGGNEMRTFYTLVMVDPDAPSPSDPNLREYLHWLVTDIPGTTGASFGQEVMCYESPRPNMGIHRFVLVLFQQLGRQTVYAPGWRQNFNTRDFAELYNLGPAV

SEQ ID NO: 808 - protein, 158 aa, Festuca arundinacea
MAGRDRDPLVVGRVVGDVLDPFVRTTNLRVTFGNRAVSNGCELKPSMVTHQPRVEVGGNEMRTFYTLVMVDPDAPSPSDPNLREYLHWLVTDIPGTTGASFGQEVMCYESPRPNMGIHRFVLVLFQQLGRQTVYAPGWRQNFNTRDFAELYNLGPAVA

SEQ ID NO: 809 - protein, 159 aa, Festuca arundinacea
MAGRDRDPLVVGRVVGDVLDPFVRTTNLRVTFGNRAVSNGCELKPSMVTHQPRVEVGGNEMRTFYTLVMVDPDAPSPSDPNLREYLHWLVTDIPGTTGASFGQEVMCYESPRPNMGIHRFVLVLFQQLGRQTVYAPGWRQNFNTRDFAELYNLGPAVAA

SEQ ID NO: 810 - protein, 15 aa, Festuca arundinacea
MAGRDRDPLVVGRVV

SEQ ID NO: 811 - protein, 160 aa, Festuca arundinacea
MAGRDRDPLVVGRVVGDVLDPFVRTTNLRVTFGNRAVSNGCELKPSMVTHQPRVEVGGNEMRTFYTLVMVDPDAPSPSDPNLREYLHWLVTDIPGTTGASFGQEVMCYESPRPNMGIHRFVLVLFQQLGRQTVYAPGWRQNFNTRDFAELYNLGPAVAAV

SEQ ID NO: 812 - protein, 161 aa, Festuca arundinacea
MAGRDRDPLVVGRVVGDVLDPFVRTTNLRVTFGNRAVSNGCELKPSMVTHQPRVEVGGNEMRTFYTLVMVDPDAPSPSDPNLREYLHWLVTDIPGTTGASFGQEVMCYESPRPNMGIHRFVLVLFQQLGRQTVYAPGWRQNFNTRDFAELYNLGPAVAAVY

SEQ ID NO: 813 - protein, 162 aa, Festuca arundinacea
MAGRDRDPLVVGRVVGDVLDPFVRTTNLRVTFGNRAVSNGCELKPSMVTHQPRVEVGGNEMRTFYTLVMVDPDAPSPSDPNLREYLHWLVTDIPGTTGASFGQEVMCYESPRPNMGIHRFVLVLFQQLGRQTVYAPGWRQNFNTRDFAELYNLGPAVAAVYF

SEQ ID NO: 814 - protein, 163 aa, Festuca arundinacea
MAGRDRDPLVVGRVVGDVLDPFVRTTNLRVTFGNRAVSNGCELKPSMVTHQPRVEVGGNEMRTFYTLVMVDPDAPSPSDPNLREYLHWLVTDIPGTTGASFGQEVMCYESPRPNMGIHRFVLVLFQQLGRQTVYAPGWRQNFNTRDFAELYNLGPAVAAVYFN

SEQ ID NO: 815 - protein, 164 aa, Festuca arundinacea
MAGRDRDPLVVGRVVGDVLDPFVRTTNLRVTFGNRAVSNGCELKPSMVTHQPRVEVGGNEMRTFYTLVMVDPDAPSPSDPNLREYLHWLVTDIPGTTGASFGQEVMCYESPRPNMGIHRFVLVLFQQLGRQTVYAPGWRQNFNTRDFAELYNLGPAVAAVYFNC

SEQ ID NO: 816 - protein, 165 aa, Festuca arundinacea
MAGRDRDPLVVGRVVGDVLDPFVRTTNLRVTFGNRAVSNGCELKPSMVTHQPRVEVGGNEMRTFYTLVMVDPDAPSPSDPNLREYLHWLVTDIPGTTGASFGQEVMCYESPRPNMGIHRFVLVLFQQLGRQTVYAPGWRQNFNTRDFAELYNLGPAVAAVYFNCQ

SEQ ID NO: 817 - protein, 166 aa, Festuca arundinacea
MAGRDRDPLVVGRVVGDVLDPFVRTTNLRVTFGNRAVSNGCELKPSMVTHQPRVEVGGNEMRTFYTLVMVDPDAPSPSDPNLREYLHWLVTDIPGTTGASFGQEVMCYESPRPNMGIHRFVLVLFQQLGRQTVYAPGWRQNFNTRDFAELYNLGPAVAAVYFNCQR

SEQ ID NO: 818 - protein, 167 aa, Festuca arundinacea
MAGRDRDPLVVGRVVGDVLDPFVRTTNLRVTFGNRAVSNGCELKPSMVTHQPRVEVGGNEMRTFYTLVMVDPDAPSPSDPNLREYLHWLVTDIPGTTGASFGQEVMCYESPRPNMGIHRFVLVLFQQLGRQTVYAPGWRQNFNTRDFAELYNLGPAVAAVYFNCQRE

SEQ ID NO: 819 - protein, 168 aa, Festuca arundinacea
MAGRDRDPLVVGRVVGDVLDPFVRTTNLRVTFGNRAVSNGCELKPSMVTHQPRVEVGGNEMRTFYTLVMVDPDAPSPSDPNLREYLHWLVTDIPGTTGASFGQEVMCYESPRPNMGIHRFVLVLFQQLGRQTVYAPGWRQNFNTRDFAELYNLGPAVAAVYFNCQREA

SEQ ID NO: 820 - protein, 169 aa, Festuca arundinacea
MAGRDRDPLVVGRVVGDVLDPFVRTTNLRVTFGNRAVSNGCELKPSMVTHQPRVEVGGNEMRTFYTLVMVDPDAPSPSDPNLREYLHWLVTDIPGTTGASFGQEVMCYESPRPNMGIHRFVLVLFQQLGRQTVYAPGWRQNFNTRDFAELYNLGPAVAAVYFNCQREAG

SEQ ID NO: 821 - protein, 16 aa, Festuca arundinacea
MAGRDRDPLVVGRVVG

SEQ ID NO: 822 - protein, 170 aa, Festuca arundinacea
MAGRDRDPLVVGRVVGDVLDPFVRTTNLRVTFGNRAVSNGCELKPSMVTHQPRVEVGGNEMRTFYTLVMVDPDAPSPSDPNLREYLHWLVTDIPGTTGASFGQEVMCYESPRPNMGIHRFVLVLFQQLGRQTVYAPGWRQNFNTRDFAELYNLGPAVAAVYFNCQREAGS

SEQ ID NO: 823 - protein, 171 aa, Festuca arundinacea
MAGRDRDPLVVGRVVGDVLDPFVRTTNLRVTFGNRAVSNGCELKPSMVTHQPRVEVGGNEMRTFYTLVMVDPDAPSPSDPNLREYLHWLVTDIPGTTGASFGQEVMCYESPRPNMGIHRFVLVLFQQLGRQTVYAPGWRQNFNTRDFAELYNLGPAVAAVYFNCQREAGSG

SEQ ID NO: 824 - protein, 172 aa, Festuca arundinacea
MAGRDRDPLVVGRVVGDVLDPFVRTTNLRVTFGNRAVSNGCELKPSMVTHQPRVEVGGNEMRTFYTLVMVDPDAPSPSDPNLREYLHWLVTDIPGTTGASFGQEVMCYESPRPNMGIHRFVLVLFQQLGRQTVYAPGWRQNFNTRDFAELYNLGPAVAAVYFNCQREAGSGG

SEQ ID NO: 825 - protein, 17 aa, Festuca arundinacea
MAGRDRDPLVVGRVVGD

SEQ ID NO: 826 - protein, 18 aa, Festuca arundinacea
MAGRDRDPLVVGRVVGDV

SEQ ID NO: 827 - protein, 19 aa, Festuca arundinacea
MAGRDRDPLVVGRVVGDVL

SEQ ID NO: 828 - protein, 20 aa, Festuca arundinacea
MAGRDRDPLVVGRVVGDVLD

SEQ ID NO: 829 - protein, 21 aa, Festuca arundinacea
MAGRDRDPLVVGRVVGDVLDP

SEQ ID NO: 830 - protein, 22 aa, Festuca arundinacea
MAGRDRDPLVVGRVVGDVLDPF

SEQ ID NO: 831 - protein, 23 aa, Festuca arundinacea
MAGRDRDPLVVGRVVGDVLDPFV

SEQ ID NO: 832 - protein, 24 aa, Festuca arundinacea
MAGRDRDPLVVGRVVGDVLDPFVR

SEQ ID NO: 833 - protein, 25 aa, Festuca arundinacea
MAGRDRDPLVVGRVVGDVLDPFVRT

SEQ ID NO: 834 - protein, 4 aa, Festuca arundinacea
MAGR

SEQ ID NO: 835 - protein, 5 aa, Festuca arundinacea
MAGRD

SEQ ID NO: 836 - protein, 6 aa, Festuca arundinacea
MAGRDR

SEQ ID NO: 837 - protein, 7 aa, Festuca arundinacea
MAGRDRD

SEQ ID NO: 838 - protein, 87 aa, Festuca arundinacea
MAGRDRDPLVVGRVVGDVLDPFVRTTNLRVTFGNRAVSNGCELKPSMVTHQPRVEVGGNEMRTFYTLVMVDPDAPSPSDPNLREYLH

SEQ ID NO: 839 - protein, 8 aa, Festuca arundinacea
MAGRDRDP

SEQ ID NO: 840 - protein, 9 aa, Festuca arundinacea
MAGRDRDPL

SEQ ID NO: 841 - protein, 167 aa, Festuca arundinacea
VGRVVGDVLDPFVRTTNLRVTFGNRAVSNGCELKPSMVTHQPRVEVGGNEMRTFYTLVMVDPDAPSPSDPNLREYLHWLVTDIPGTTGASFGQEVMCYESPRPNMGIHRFVLVLFQQLGRQTVYAPGWRQNFNTRDFAELYNLGPAVAAVYFNCQREAGSGGRRMYN

SEQ ID NO: 842 - protein, 166 aa, Festuca arundinacea
GRVVGDVLDPFVRTTNLRVTFGNRAVSNGCELKPSMVTHQPRVEVGGNEMRTFYTLVMVDPDAPSPSDPNLREYLHWLVTDIPGTTGASFGQEVMCYESPRPNMGIHRFVLVLFQQLGRQTVYAPGWRQNFNTRDFAELYNLGPAVAAVYFNCQREAGSGGRRMYN

SEQ ID NO: 843 - protein, 165 aa, Festuca arundinacea
RVVGDVLDPFVRTTNLRVTFGNRAVSNGCELKPSMVTHQPRVEVGGNEMRTFYTLVMVDPDAPSPSDPNLREYLHWLVTDIPGTTGASFGQEVMCYESPRPNMGIHRFVLVLFQQLGRQTVYAPGWRQNFNTRDFAELYNLGPAVAAVYFNCQREAGSGGRRMYN

SEQ ID NO: 844 - protein, 164 aa, Festuca arundinacea
VVGDVLDPFVRTTNLRVTFGNRAVSNGCELKPSMVTHQPRVEVGGNEMRTFYTLVMVDPDAPSPSDPNLREYLHWLVTDIPGTTGASFGQEVMCYESPRPNMGIHRFVLVLFQQLGRQTVYAPGWRQNFNTRDFAELYNLGPAVAAVYFNCQREAGSGGRRMYN

SEQ ID NO: 845 - protein, 163 aa, Festuca arundinacea
VGDVLDPFVRTTNLRVTFGNRAVSNGCELKPSMVTHQPRVEVGGNEMRTFYTLVMVDPDAPSPSDPNLREYLHWLVTDIPGTTGASFGQEVMCYESPRPNMGIHRFVLVLFQQLGRQTVYAPGWRQNFNTRDFAELYNLGPAVAAVYFNCQREAGSGGRRMYN

SEQ ID NO: 846 - protein, 162 aa, Festuca arundinacea
GDVLDPFVRTTNLRVTFGNRAVSNGCELKPSMVTHQPRVEVGGNEMRTFYTLVMVDPDAPSPSDPNLREYLHWLVTDIPGTTGASFGQEVMCYESPRPNMGIHRFVLVLFQQLGRQTVYAPGWRQNFNTRDFAELYNLGPAVAAVYFNCQREAGSGGRRMYN

SEQ ID NO: 847 - protein, 161 aa, Festuca arundinacea
DVLDPFVRTTNLRVTFGNRAVSNGCELKPSMVTHQPRVEVGGNEMRTFYTLVMVDPDAPSPSDPNLREYLHWLVTDIPGTTGASFGQEVMCYESPRPNMGIHRFVLVLFQQLGRQTVYAPGWRQNFNTRDFAELYNLGPAVAAVYFNCQREAGSGGRRMYN

SEQ ID NO: 848 - protein, 160 aa, Festuca arundinacea
VLDPFVRTTNLRVTFGNRAVSNGCELKPSMVTHQPRVEVGGNEMRTFYTLVMVDPDAPSPSDPNLREYLHWLVTDIPGTTGASFGQEVMCYESPRPNMGIHRFVLVLFQQLGRQTVYAPGWRQNFNTRDFAELYNLGPAVAAVYFNCQREAGSGGRRMYN

SEQ ID NO: 849 - protein, 159 aa, Festuca arundinacea
LDPFVRTTNLRVTFGNRAVSNGCELKPSMVTHQPRVEVGGNEMRTFYTLVMVDPDAPSPSDPNLREYLHWLVTDIPGTTGASFGQEVMCYESPRPNMGIHRFVLVLFQQLGRQTVYAPGWRQNFNTRDFAELYNLGPAVAAVYFNCQREAGSGGRRMYN

SEQ ID NO: 850 - protein, 158 aa, Festuca arundinacea
DPFVRTTNLRVTFGNRAVSNGCELKPSMVTHQPRVEVGGNEMRTFYTLVMVDPDAPSPSDPNLREYLHWLVTDIPGTTGASFGQEVMCYESPRPNMGIHRFVLVLFQQLGRQTVYAPGWRQNFNTRDFAELYNLGPAVAAVYFNCQREAGSGGRRMYN

SEQ ID NO: 851 - protein, 174 aa, Festuca arundinacea
AGRDRDPLVVGRVVGDVLDPFVRTTNLRVTFGNRAVSNGCELKPSMVTHQPRVEVGGNEMRTFYTLVMVDPDAPSPSDPNLREYLHWLVTDIPGTTGASFGQEVMCYESPRPNMGIHRFVLVLFQQLGRQTVYAPGWRQNFNTRDFAELYNLGPAVAAVYFNCQREAGSGGRRM

SEQ ID NO: 852 - protein, 157 aa, Festuca arundinacea
PFVRTTNLRVTFGNRAVSNGCELKPSMVTHQPRVEVGGNEMRTFYTLVMVDPDAPSPSDPNLREYLHWLVTDIPGTTGASFGQEVMCYESPRPNMGIHRFVLVLFQQLGRQTVYAPGWRQNFNTRDFAELYNLGPAVAAVYFNCQREAGSGGRRMYN

SEQ ID NO: 853 - protein, 156 aa, Festuca arundinacea
FVRTTNLRVTFGNRAVSNGCELKPSMVTHQPRVEVGGNEMRTFYTLVMVDPDAPSPSDPNLREYLHWLVTDIPGTTGASFGQEVMCYESPRPNMGIHRFVLVLFQQLGRQTVYAPGWRQNFNTRDFAELYNLGPAVAAVYFNCQREAGSGGRRMYN

SEQ ID NO: 854 - protein, 155 aa, Festuca arundinacea
VRTTNLRVTFGNRAVSNGCELKPSMVTHQPRVEVGGNEMRTFYTLVMVDPDAPSPSDPNLREYLHWLVTDIPGTTGASFGQEVMCYESPRPNMGIHRFVLVLFQQLGRQTVYAPGWRQNFNTRDFAELYNLGPAVAAVYFNCQREAGSGGRRMYN

SEQ ID NO: 855 - protein, 154 aa, Festuca arundinacea
RTTNLRVTFGNRAVSNGCELKPSMVTHQPRVEVGGNEMRTFYTLVMVDPDAPSPSDPNLREYLHWLVTDIPGTTGASFGQEVMCYESPRPNMGIHRFVLVLFQQLGRQTVYAPGWRQNFNTRDFAELYNLGPAVAAVYFNCQREAGSGGRRMYN

SEQ ID NO: 856 - protein, 153 aa, Festuca arundinacea
TTNLRVTFGNRAVSNGCELKPSMVTHQPRVEVGGNEMRTFYTLVMVDPDAPSPSDPNLREYLHWLVTDIPGTTGASFGQEVMCYESPRPNMGIHRFVLVLFQQLGRQTVYAPGWRQNFNTRDFAELYNLGPAVAAVYFNCQREAGSGGRRMYN

SEQ ID NO: 857 - protein, 152 aa, Festuca arundinacea
TNLRVTFGNRAVSNGCELKPSMVTHQPRVEVGGNEMRTFYTLVMVDPDAPSPSDPNLREYLHWLVTDIPGTTGASFGQEVMCYESPRPNMGIHRFVLVLFQQLGRQTVYAPGWRQNFNTRDFAELYNLGPAVAAVYFNCQREAGSGGRRMYN

SEQ ID NO: 858 - protein, 151 aa, Festuca arundinacea
NLRVTFGNRAVSNGCELKPSMVTHQPRVEVGGNEMRTFYTLVMVDPDAPSPSDPNLREYLHWLVTDIPGTTGASFGQEVMCYESPRPNMGIHRFVLVLFQQLGRQTVYAPGWRQNFNTRDFAELYNLGPAVAAVYFNCQREAGSGGRRMYN

SEQ ID NO: 859 - protein, 150 aa, Festuca arundinacea
LRVTFGNRAVSNGCELKPSMVTHQPRVEVGGNEMRTFYTLVMVDPDAPSPSDPNLREYLHWLVTDIPGTTGASFGQEVMCYESPRPNMGIHRFVLVLFQQLGRQTVYAPGWRQNFNTRDFAELYNLGPAVAAVYFNCQREAGSGGRRMYN

SEQ ID NO: 860 - protein, 141 aa, Festuca arundinacea
VSNGCELKPSMVTHQPRVEVGGNEMRTFYTLVMVDPDAPSPSDPNLREYLHWLVTDIPGTTGASFGQEVMCYESPRPNMGIHRFVLVLFQQLGRQTVYAPGWRQNFNTRDFAELYNLGPAVAAVYFNCQREAGSGGRRMYN

SEQ ID NO: 861 - protein, 174 aa, Festuca arundinacea
RDRDPLVVGRVVGDVLDPFVRTTNLRVTFGNRAVSNGCELKPSMVTHQPRVEVGGNEMRTFYTLVMVDPDAPSPSDPNLREYLHWLVTDIPGTTGASFGQEVMCYESPRPNMGIHRFVLVLFQQLGRQTVYAPGWRQNFNTRDFAELYNLGPAVAAVYFNCQREAGSGGRRMYN

SEQ ID NO: 862 - protein, 130 aa, Festuca arundinacea
VTHQPRVEVGGNEMRTFYTLVMVDPDAPSPSDPNLREYLHWLVTDIPGTTGASFGQEVMCYESPRPNMGIHRFVLVLFQQLGRQTVYAPGWRQNFNTRDFAELYNLGPAVAAVYFNCQREAGSGGRRMYN

SEQ ID NO: 863 - protein, 173 aa, Festuca arundinacea
DRDPLVVGRVVGDVLDPFVRTTNLRVTFGNRAVSNGCELKPSMVTHQPRVEVGGNEMRTFYTLVMVDPDAPSPSDPNLREYLHWLVTDIPGTTGASFGQEVMCYESPRPNMGIHRFVLVLFQQLGRQTVYAPGWRQNFNTRDFAELYNLGPAVAAVYFNCQREAGSGGRRMYN

SEQ ID NO: 864 - protein, 172 aa, Festuca arundinacea
RDPLVVGRVVGDVLDPFVRTTNLRVTFGNRAVSNGCELKPSMVTHQPRVEVGGNEMRTFYTLVMVDPDAPSPSDPNLREYLHWLVTDIPGTTGASFGQEVMCYESPRPNMGIHRFVLVLFQQLGRQTVYAPGWRQNFNTRDFAELYNLGPAVAAVYFNCQREAGSGGRRMYN

SEQ ID NO: 865 - protein, 109 aa, Festuca arundinacea
MVDPDAPSPSDPNLREYLHWLVTDIPGTTGASFGQEVMCYESPRPNMGIHRFVLVLFQQLGRQTVYAPGWRQNFNTRDFAELYNLGPAVAAVYFNCQREAGSGGRRMYN

SEQ ID NO: 866 - protein, 171 aa, Festuca arundinacea
DPLVVGRVVGDVLDPFVRTTNLRVTFGNRAVSNGCELKPSMVTHQPRVEVGGNEMRTFYTLVMVDPDAPSPSDPNLREYLHWLVTDIPGTTGASFGQEVMCYESPRPNMGIHRFVLVLFQQLGRQTVYAPGWRQNFNTRDFAELYNLGPAVAAVYFNCQREAGSGGRRMYN

SEQ ID NO: 867 - protein, 170 aa, Festuca arundinacea
PLVVGRVVGDVLDPFVRTTNLRVTFGNRAVSNGCELKPSMVTHQPRVEVGGNEMRTFYTLVMVDPDAPSPSDPNLREYLHWLVTDIPGTTGASFGQEVMCYESPRPNMGIHRFVLVLFQQLGRQTVYAPGWRQNFNTRDFAELYNLGPAVAAVYFNCQREAGSGGRRMYN

SEQ ID NO: 868 - protein, 169 aa, Festuca arundinacea
LVVGRVVGDVLDPFVRTTNLRVTFGNRAVSNGCELKPSMVTHQPRVEVGGNEMRTFYTLVMVDPDAPSPSDPNLREYLHWLVTDIPGTTGASFGQEVMCYESPRPNMGIHRFVLVLFQQLGRQTVYAPGWRQNFNTRDFAELYNLGPAVAAVYFNCQREAGSGGRRMYN

SEQ ID NO: 869 - protein, 80 aa, Festuca arundinacea
GASFGQEVMCYESPRPNMGIHRFVLVLFQQLGRQTVYAPGWRQNFNTRDFAELYNLGPAVAAVYFNCQREAGSGGRRMYN

SEQ ID NO: 870 - protein, 168 aa, Festuca arundinacea
VVGRVVGDVLDPFVRTTNLRVTFGNRAVSNGCELKPSMVTHQPRVEVGGNEMRTFYTLVMVDPDAPSPSDPNLREYLHWLVTDIPGTTGASFGQEVMCYESPRPNMGIHRFVLVLFQQLGRQTVYAPGWRQNFNTRDFAELYNLGPAVAAVYFNCQREAGSGGRRMYN

SEQ ID NO: 871 - DNA, 858 bp, Cucurbita maxima
gagacaattacgcatcttttcagctctctcacgtactaccatcctctcgacgccatgccgagagaccgtgaccctttggtcgttgggagagtcatcggcgacgttatcgactcgttcacgaagtccatttcgattagggctacttacaacaacagggaaattagcaatggctgtgagctcaaaccctctcaagttgtcaaccagccaagagttgagattggtggcactgaccttcgcaccttcttcactttggttatggtggatcctgatgctcctagccctagtgatcctaatctaagggaatacttgcattggttggtgactgatatcccagctacaactggagcgaactttggtcaagagatcgtgtgctatgagagcccaagacccacggtgggtatccatcgtcttgtgctggtgttgtttcgacagcttggaaggcaaacggtgtacgctcctgggtggcgccagaacttcaacacaagagactttgcagagctttacaatcttggcttgccggtggcagccgtttatttcaattgccaaagggaaagtgggtctggtggaaggagaagaacccaagatgatttctaagccccacttcacattaattagattaatattatagcccctatcatctattaatcctaccttgcttttagattaacctttattttgagtacacccatggatcataaataagcccaaaatgcattcctaatattgctcttatactcgtttcgtatgaatcactgtcttttcttctttgtttttcttgttcgagtgttcatgttgtgctttttttttcgtatgaatcaaagtagaagatcaagattcgaaaaaaaaaaaaaaaaaaaa

SEQ ID NO: 872 - protein, 179 aa, Cucurbita maxima
MPRDRDPLVVGRVIGDVIDSFTKSISIRATYNNREISNGCELKPSQVVNQPRVEIGGTDLRTFFTLVMVDPDAPSPSDPNLREYLHWLVTDIPATTGANFGQEIVCYESPRPTVGIHRLVLVLFRQLGRQTVYAPGWRQNFNTRDFAELYNLGLPVAAVYFNCQRESGSGGRRRTQDDF

SEQ ID NO: 873 - protein, 11 aa, Artificial Sequence
  Made in the lab
VIGDVVDSFSR

SEQ ID NO: 874 - protein, 11 aa, Artificial Sequence
  Made in the lab
VIGDVIDSFTK

SEQ ID NO: 875 - protein, 9 aa, Artificial Sequence
  Made in the lab
VEIGGTDLR

We claim:

1. An isolated polynucleotide comprising a sequence selected from the group consisting of SEQ ID NO: 1-25, 51-75, 119-151, 185-217, 271-322, 375-378, 403-480, 559-636, 715-792 and 871.

2. The isolated polynucleotide of claim 1, wherein the polynucleotide is selected from the group consisting of SEQ ID NO: 132 and 871.

3. An isolated polynucleotide that encodes an amino acid sequence selected from the group consisting of SEQ ID NO: 26-50, 76-100, 152-184, 218-250, 323-374, 379, 380, 481-558, 637-714, 793-870 and 872.

4. An isolated polynucleotide comprising a sequence selected from the group consisting of:
(a) complements of a sequence of SEQ ID NO: 1-25, 51-75, 119-151, 185-217, 271-322, 375-378, 403-480, 559-636, 715-792 and 871;
(b) reverse complements of a sequence of SEQ ID NO: 1-25, 51-75, 119-151, 185-217, 271-322, 375-378, 403-480, 559-636, 715-792 and 871; and
(c) reverse sequences of a sequence of SEQ ID NO: 1-25, 51-75, 119-151, 185-217, 271-322, 375-378, 403-480, 559-636, 715-792 and 871.

5. An isolated polynucleotide comprising a sequence selected from the group consisting of:
(a) sequences having at least 85% identity to a sequence of SEQ ID NO: 1-25, 51-75, 119-151, 185-217, 271-322, 375-378, 403-480, 559-636, 715-792 and 871;
(b) sequences having at least 90% identity to a sequence of SEQ ID NO: 1-25, 51-75, 119-151, 185-217, 271-322, 375-378, 403-480, 559-636, 715-792 and 871;
(c) sequences having at least 95% identity to a sequence of SEQ ID NO: 1-25, 51-75, 119-151, 185-217, 271-322, 375-378, 403-480, 559-636, 715-792 and 871;
(d) sequences having at least 98% identity to a sequence of SEQ ID NO: 1-25, 51-75, 119-151, 185-217, 271-322, 375-378, 403-480, 559-636, 715-792 and 871; and
(e) sequences that hybridize to a sequence of SEQ ID NO: 1-25, 51-75, 119-151, 185-217, 271-322, 375-378, 403-480, 559-636, 715-792 and 871 under stringent hybridization conditions,
wherein the polynucleotide encodes a polypeptide having substantially the same functional properties as a polypeptide encoded by a sequence of SEQ ID NO: 1-25, 51-75, 119-151, 185-217, 271-322, 375-378, 403-480, 559-636, 715-792 and 871.

6. A genetic construct comprising the isolated polynucleotide of claim 1.

7. A genetic construct comprising the isolated polynucleotide of claim 5.

8. A transgenic cell comprising the genetic construct of claim 6, wherein the transgenic cell is a bacterial cell or a plant cell.

9. A transgenic cell comprising the genetic construct of claim 7, wherein the transgenic cell is a bacterial cell or a plant cell.

10. A transgenic plant comprising the transgenic cell of claim 8.

11. A transgenic plant comprising the transgenic cell of claim 9.

12. An isolated polypeptide comprising a sequence selected from the group consisting of: SEQ ID NO: 26-50, 76-100, 152-184, 218-250, 323-374, 379, 380, 481-558, 637-714, 793-870 and 872.

13. The isolated polypeptide of claim 12, wherein the sequence is selected from the group consisting of: SEQ ID NO: 165 and 874.

14. An isolated polypeptide comprising a sequence selected from the group consisting of:
(a) sequences having at least 85% identity to a sequence of SEQ ID NO: 26-50, 76-100, 152-184, 218-250, 323-374, 379, 380, 481-558, 637-714, 793-870 and 872;
(b) sequences having at least 90% identity to a sequence of SEQ ID NO: 26-50, 76-100, 152-184, 218-250, 323-374, 379, 380, 481-558, 637-714, 793-870 and 872;
(c) sequences having at least 95% identity to a sequence of SEQ ID NO: 26-50, 76-100, 152-184, 218-250, 323-374, 379, 380, 481-558, 637-714, 793-870 and 872; and
(d) sequences having at least 98% identity to a sequence of SEQ ID NO: 26-50, 76-100, 152-184, 218-250, 323-374, 379, 380, 481-558, 637-714, 793-870 and 872,
wherein the polypeptide has substantially the same functional properties as a polypeptide of SEQ ID NO: 26-50, 76-100, 152-184, 218-250, 323-374, 379, 380, 481-558, 637-714, 793-870 and 872.

15. A method for increasing the expression of a polypeptide selected from the group consisting of SEQ ID NO: 26-50, 76-100, 152-184, 218-250, 323-374, 379, 380, 481-558, 637-714, 793-870 and 872 in a target plant, comprising stably incorporating into the genome of the plant the genetic construct of claim 6.

16. A method of inducing flowering in a plant grown under non-inductive conditions, comprising
(a) introducing into the plant a genetic construct of claim 6, and
(b) expressing the sequence in the vasculature of the plant.

17. A method of inducing flowering in a plant grown under non-inductive conditions, comprising
(a) introducing into the plant a genetic construct of claim 7, and
(b) expressing the sequence in the vasculature of the plant.

18. A method for identifying a gene that promotes flowering, comprising
(a) identifying putative miRNA flowering control regulatory sequences from at least one sRNA database,
(b) selecting one or more miRNA sequences that produce a delay in flowering time relative to control plants when expressed in a plant, and
(c) identifying the miRNA target gene that promotes flowering.

19. The method of claim 6, wherein the flower promoting gene is the target of a polynucleotide sequence identified as SEQ ID NO: 381.

20. A method for identifying a gene involved in the long-distance florigen signaling pathway comprising:
(a) comparing the gene transcripts in the phloem sap and phloem tissue cDNA libraries of florally induced and noninduced plants;
(b) identifying a polynucleotide sequence with consensi having one or more of the following characteristics:
consensi that show hits to SwissProt/Tremble or Arabidopsis sequences that are known or putative regulatory genes;
consensi that encode known floral regulators;
consensi that are differentially expressed in phloem sap and solid tissue libraries;
consensi conserved between species at the nucleotide level;
consensi conserved between species at the protein level; and
consensi showing a biased contribution of EST members from flowering or non-flowering phloem sap; and
(c) expressing the identified polynucleotide sequence in a plant by transforming a plant with a recombinant genetic construct or viral vector comprising the isolated sequence, and analyzing its effect on flowering.

21. The method of claim 20, wherein the plant is selected from the group consisting of: Sicyos angulatus (Bur Cucumber); Cucurbita moschata (butternut); C. maxima (pumpkin); Cucumis sativus (cucumber); N. tabacum cv Maryland mammoth; N. tabacum cv Samsun; Nicotiana benthamiana; and heterografts of C. sativus/C. maxima, C. sativus/Sicyos angulatus, N. tabacum cv Maryland mammoth/N. tabacum cv Samsun, and early and late flowering accessions of C. moschata.
